(19) United States
(12) Patent Application Publication
(10) Pub. No.: US 2007/0202107 A1
(43) Pub. Date: Aug. 30, 2007

(54) Novel kinases

(75) Inventors: David Whyte, Belmont, CA (US); Gerard Manning, Menlo Park, CA (US); Sean Caenepeel, Walnut Creek, CA (US)

Correspondence Address: FOLEY AND LARDNER LLP;SUITE 500, 3000 K STREET NW, WASHINGTON, DC, 20007, US

(73) Assignee: Sugen, Inc.

(21) Appl. No.: 11/407,888

(22) Filed: Apr. 21, 2006

Related U.S. Application Data
(62) Division of application No. 10/618,941, filed on Jul. 15, 2003, now abandoned.
(60) Provisional application No. 60/395,632, filed on Jul. 15, 2002.

(51) Int. Cl. A61K 38/55; C12Q 1/68; G01N 33/574; C07H 21/04; C12P 21/06; A61K 39/395; C12N 9/12

(52) U.S. Cl. 424/146.1; 435/7.23; 435/69.1; 435/194; 435/320.1; 435/325; 514/2; 530/388.26; 536/23.2; 435/6

(57) ABSTRACT

The present invention relates to kinase polypeptides, nucleotide sequences encoding the kinase polypeptides, as well as various products and methods useful for the diagnosis and treatment of various kinase-related diseases and conditions. Through the use of a bioinformatics strategy, mammalian members of the of PTK's and STK's have been identified and their protein structure predicted.

[0001] This application claims priority to U.S. Provisional Application No. 60/395,632, which was filed on Jul. 15, 2002.

### FIELD OF THE INVENTION

[0002] The present invention relates to kinase polypeptides, nucleotide sequences encoding the kinase polypeptides, as well as various products and methods useful for the diagnosis and treatment of various kinase-related diseases and conditions.

### BACKGROUND OF THE INVENTION

[0003] The following description of the background of the invention is provided to aid in understanding the invention, but is not admitted to be or to describe prior art to the invention.

[0004] Cellular signal transduction is a fundamental mechanism whereby external stimuli that regulate diverse cellular processes are relayed to the interior of cells. One of the key biochemical mechanisms of signal transduction involves the reversible phosphorylation of proteins, which enables regulation of the activity of mature proteins by altering their structure and function.

[0005] Protein phosphorylation plays a pivotal role in cellular signal transduction. Among the biological functions controlled by this type of postranslational modification are: cell division, differentiation and death (apoptosis); cell motility and cytoskeletal structure; control of DNA replication, transcription, splicing and translation; protein translocation events from the endoplasmic reticulum and Golgi apparatus to the membrane and extracellular space; protein nuclear import and export; regulation of metabolic reactions, etc. Abnormal protein phosphorylation is widely recognized to be causally linked to the etiology of many diseases including cancer as well as immunologic, neuronal and metabolic disorders.

[0006] The following abbreviations are used for kinases throughout this application:

[0007] ASK Apoptosis signal-regulating kinase

[0008] CaMK Ca2+/calmodulin-dependent protein kinase

[0009] CCRK Cell cycle-related kinase

[0010] CDK Cyclin-dependent kinase

[0011] CK Casein kinase

[0012] DAPK Death-associated protein kinase

[0013] DM myotonic dystrophy kinase

[0014] Dyrk dual-specificity-tyrosine phosphorylating-regulated kinase

[0015] GAK Cyclin G-associated kinase

[0016] GRK G-protein coupled receptor

[0017] GuC Guanylate cyclase

[0018] HIPK Homeodomain-interacting protein kinase

[0019] IRAK Interleukin-1 receptor-associated kinase

[0020] MAPK Mitogen activated protein kinase

[0021] MAST Microtubule-associated STK

[0022] MLCK Myosin-light chain kinase

[0023] MLK Mixed lineage kinase

[0024] NEK NimA-related protein kinase (═NEK)

[0025] PKA cAMP-dependent protein kinase

[0026] RSK Ribosomal protein S6 kinase

[0027] RTK Receptor tyrosine kinase

[0028] SGK Serum and glucocorticoid-regulated kinase

[0029] STK serine threonine kinase

[0030] ULK UNC-5,1-like kinase

[0031] Protein kinases in eukaryotes phosphorylate proteins on the hydroxyl substituent of serine, threonine and tyrosine residues, which are the most common phospho-acceptor amino acid residues. However, phosphorylation on histidine has also been observed in bacteria.

[0032] The presence of a phosphate moiety modulates protein function in multiple ways. A common mechanism includes changes in the catalytic properties (Vmax and Km) of an enzyme, leading to its activation or inactivation.

[0033] A second widely recognized mechanism involves promoting protein-protein interactions. An example of this is the tyrosine autophosphorylation of the ligand-activated EGF receptor tyrosine kinase. This event triggers the high-affinity binding to the phosphotyrosine residue on the receptor's C-terminal intracellular domain of the SH2 motif of the adaptor molecule Grb2. Grb2, in turn, binds through its SH3 motif to a second adaptor molecule, such as SHC. The formation of this ternary complex activates the signaling events that are responsible for the biological effects of EGF. Serine and threonine phosphorylation events also have been recently recognized to exert their biological function through protein-protein interaction events that are mediated by the high-affinity binding of phosphoserine and phosphothreonine to WW motifs present in a large variety of proteins (Lu, P. J. et al. (1999) Science 283: 1325-1328).

[0034] A third important outcome of protein phosphorylation is changes in the subcellular localization of the substrate. As an example, nuclear import and export events in a large diversity of proteins are regulated by protein phosphorylation (Drier E. A. et al. (1999) Genes Dev 13: 556-568).

[0035] Protein kinases are one of the largest families of eukaryotic proteins with several hundred known members. These proteins share a 250-300 amino acid domain that can be subdivided into 12 distinct subdomains that comprise the common catalytic core structure. These conserved protein motifs have recently been exploited using PCR-based and bioinformatic strategies leading to a significant expansion of the known kinases.

[0036] Kinases largely fall into two groups: those specific for phosphorylating serines and threonines, and those specific for phosphorylating tyrosines. Some kinases, referred to as “dual specificity” kinases, are able to phosphorylate tyrosine as well as serine/threonine residues.

[0037] Protein kinases can also be characterized by their location within the cell. Some kinases are transmembrane receptor-type proteins capable of directly altering their catalytic activity in response to the external environment such as the binding of a ligand. Others are non-receptor-type proteins lacking any transmembrane domain. They can be found in a variety of cellular compartments from the inner surface of the cell membrane to the nucleus.

[0038] Many kinases are involved in regulatory cascades wherein their substrates may include other kinases whose activities are regulated by their phosphorylation state. Ultimately the activity of some downstream effector is modulated by phosphorylation resulting from activation of such a pathway. The conserved protein motifs of these kinases have recently been exploited using PCR-based cloning strategies leading to a significant expansion of the known kinases.

[0039] Multiple alignment of the sequences in the catalytic domain of protein kinases and subsequent parsimony analysis permits the segregation of related kinases into distinct branches of subfamilies including: tyrosine kinases (PTK's), dual-specificity kinases, and serine/threonine kinases (STK's). The latter subfamily includes cyclic-nucleotide-dependent kinases, calcium/calmodulin kinases, cyclin-dependent kinases (CDK's), MAP-kinases, serine-threonine kinase receptors, and several other less defined subfamilies.

[0040] The protein kinases may be classified into several major groups including AGC, CAMK, Casein kinase 1, CMGC, STE, tyrosine kinases, and atypical kinases (Plowman, G D et al., Proceedings of the National Academy of Sciences, USA, Vol. 96, Issue 24, 13603-13610, Nov. 23, 1999; see also www.kinase.com). Within each group are several distinct families of more closely related kinases. In addition, there is a group designated “other” to represent several smaller families. In addition, an “atypical” family represents those protein kinases whose catalytic domain has little or no primary sequence homology to conventional kinases, including the alpha kinases, pyruvate dehydrogenase kinases, A6 kinases and PI3 kinases.

[0041] AGC Group

[0042] The AGC kinases are basic amino acid-directed enzymes that phosphorylate residues found proximal to Arg and Lys. Examples of this group are the G protein-coupled receptor kinases (GRKs), the cyclic nucleotide-dependent kinases (PKA, PKC, PKG), NDR or DBF2 kinases, ribosomal S6 kinases, AKT kinases, myotonic dystrophy kinases (DMPKs), MAPK interacting kinases (MNKs), MAST kinases, and the YANK family.

[0043] GRKs regulate signaling from heterotrimeric guanine protein coupled receptors (GPCRs). Mutations in GPCRs cause a number of human diseases, including retinitis pigmentosa, stationary night blindness, color blindness, hyperfunctioning thyroid adenomas, familial precocious puberty, familial hypocalciuric hypercalcemia and neonatal severe hyperparathroidism (OMIM, http://www.ncbi.nlm.nih.gov/Omim/). The regulation of GPCRs by GRKs indirectly implicates GRKs in these diseases.

[0044] The cAMP-dependent protein kinases (PKA) consist of heterotetramers comprised of 2 catalytic (C) and 2 regulatory (R) subunits, in which the R subunits bind to the second messenger cAMP, leading to dissociation of the active C subunits from the complex. Many of these kinases respond to second messengers such as cAMP resulting in a wide range of cellular responses to hormones and neurotransmitters.

[0045] AKT is a mammalian proto-oncoprotein regulated by phosphatidylinositol 3-kinase (PI3-K), which appears to function as a cell survival signal to protect cells from apoptosis. Insulin receptor, RAS, PI3-K, and PDK1 all act as upstream activators of AKT, whereas the lipid phosphatase PTEN functions as a negative regulator of the P13-K/AKT pathway. Downstream targets for AKT-mediated cell survival include the pro-apoptotic factors BAD and Caspase9, and transcription factors in the forkhead family, such as DAF-16 in the worm. AKT is also an essential mediator in insulin signaling, in part due to its use of GSK-3 as another downstream target.

[0046] The S6 kinases (RSK) regulate a wide array of cellular processes involved in mitogenic response including protein synthesis, translation of specific mRNA species, and cell cycle progression from G1 to S phase. One of the RSK genes has been localized to chromosomal region 17q23 and is amplified in breast cancer (Couch, et al., Cancer Res. 1999 Apr. 1; 59(7): 1408-11).

[0047] CAMK Group

[0048] The CAMK kinases are also basic amino acid-directed kinases. They include the Ca2+/calmodulin-regulated and AMP-dependent protein kinases (AMPK), myosin light chain kinases (MLCK), MAP kinase activating protein kinases (MAPKAPKs), checkpoint 2 kinases (CHK2), death-associated protein kinases (DAPKs), phosphorylase kinase (PHK), Rac and Rho-binding Trio kinases, a “unique” family of CAMKs, and the MARK family of protein kinases.

[0049] The MARK family of STKs are involved in the control of cell polarity, microtubule stability and cancer. One member of the MARK family, C-TAK1, has been reported to control entry into mitosis by activating Cdc25C which in turn dephosphorylates Cdc2.

[0050] CMGC Group

[0051] The CMGC kinases are “proline-directed” enzymes phosphorylating residues that exist in a proline-rich context. They include the cyclin-dependent kinases (CDKs), mitogen-activated protein kinases (MAPKs), GSK3s, RCKs, (dual-specific tyrosine kinases) DYRKs, (SR-protein specific kinase) SRPKs, and CLKs. Most CMGC kinases have larger-than-average kinase domains owing to the presence of insertions within subdomains X and XI.

[0052] CDKs play a pivotal role in the regulation of mitosis during cell division. The process of cell division occurs in four stages: S phase, the period during which chromosomes duplicate, G2, mitosis and G1 or interphase. During mitosis the duplicated chromosomes are evenly segregated allowing each daughter cell to receive a complete copy of the genome. A key mitotic regulator in all eukaryotic cells is the STK cdc2, a CDK regulated by cyclin B. However some CDK-like kinases, such as CDK5 are not cyclin associated nor are they cell cycle regulated.

[0053] MAPKs play a pivotal role in many cellular signaling pathways, including stress response and mitogenesis (Lewis, T. S., Shapiro, P. S., and Ahn, N. G. (1998) Adv. Cancer Res. 74, 49-139). MAP kinases can be activated by growth factors such as EGF, and cytokines such as TNF-alpha. In response to EGF, Ras becomes activated and recruits Raf1 to the membrane where Raf1 is activated by mechanisms that may involve phosphorylation and conformational changes (Morrison, D. K., and Cutler, R. E. (1997) Curr. Opin. Cell Biol. 9, 174-179). Active Raf1 phosphorylates MEK1 which in turn phosphorylates and activates the ERKs subfamily of MAPKs. DYRKS are dual-specificity tyrosine kinases.

[0054] Tyrosine Protein Kinase Group

[0055] The tyrosine kinase group encompass both cytoplasmic (e.g. src) as well as transmembrane receptor tyrosine kinases (e.g. EGF receptor). These kinases play a pivotal role in the signal transduction processes that mediate cell proliferation, differentiation and apoptosis.

[0056] STE Group

[0057] The STE family refers to the 3 classes of protein kinases that lie sequentially upstream of the MAPKs. This group includes STE7 (MEK or MAP2K) kinases, STE11 (MEKK or MAP2K) kinases and STE20 (MEKKK or MAP4K) kinases. In humans, several protein kinase families that bear only distant homology with the STE11 family also operate at the level of MAP3Ks including RAF, MLK, TAK1, and COT. Since crosstalk takes place between protein kinases functioning at different levels of the MAPK cascade, the large number of STE family kinases could translate into an enormous potential for upstream signal specificity. This also includes homologues of the yeast sterile family kinases (STE), which refers to 3 classes of kinases which lie sequentially upstream of the MAPKs;

[0058] The prototype STE20 from baker's yeast is regulated by a hormone receptor, signaling to directly affect cell cycle progression through modulation of CDK activity. It also coordinately regulates changes in the cytoskeleton and in transcriptional programs in a bifurcating pathway. In a similar way, the homologous kinases in humans are likely to play a role in extracellular regulation of growth, cell adhesion and migration, and changes in transcriptional programs, all three of which have critical roles in tumorigenesis. Mammalian STE20-related protein kinases have been implicated in response to growth factors or cytokines, oxidative-, UV-, or irradiation-related stress pathways, inflammatory signals (e.g. TNFα), apoptotic stimuli (e.g. Fas), T and B cell costimulation, the control of cytoskeletal architecture, and cellular transformation. Typically the STE20-related kinases serve as upstream regulators of MAPK cascades. Examples include: HPK1, a protein-serine/threonine kinase (STK) that possesses a STE20-like kinase domain that activates a protein kinase pathway leading to the stress-activated protein kinase SAPK/JNK; PAK1, an STK with an upstream GTPase-binding domain that interacts with Rac and plays a role in cellular transformation through the Ras-MAPK pathway; and murine NIK, which interacts with upstream receptor tyrosine kinases and connects with downstream STE11-family kinases.

[0059] NEK kinases are related to NIMA, which is required for entry into mitosis in the filamentous fungus A. nidulans. Mutations in the nimA gene cause the nim (never in mitosis) G2 arrest phenotype in this fungus (Fry, A. M. and Nigg, E. A. (1995) Current Biology 5: 1122-1125). Several observations suggest that higher eukaryotes may have a NIMA functional counterpart(s): (1) expression of a dominant-negative form of NIMA in HeLa cells causes a G2 arrest; (2) overexpression of NIA causes chromatin condensation, not only in A. nidulans, but also in yeast, Xenopus oocytes and HeLa cells (Lu, K. P. and Hunter, T. (1995) Prog. Cell Cycle Res. 1, 187-205); (3) NIMA when expressed in mammalian cells interacts with pin1, a prolyl-prolyl isomerase that functions in cell cycle regulation (Lu, K. P. et al. (1996) Nature 380, 544-547); (4) okadaic acid inhibitor studies suggests the presence of cdc2-independent mechanism to induce mitosis (Ghosh, S. et al.(1998) Exp. Cell Res. 242, 1-9) and (5) a NIMA-like kinase (fin1) exists in another eukaryote besides Aspergillus, Saccharomyces pombe (Krien, M. J. E. et al. (1998) J. Cell Sci. 111, 967-976). Eleven mammalian NIMA-like kinases have been identified—NEK1-11. Despite the similarity of the NIA-related kinases to NIMA over the catalytic region, the mammalian kinases are structurally different to N over the extracatalytic regions. In addition several of the mammalian kinases are unable to complement the nim phenotype in Aspergillus nimA mutants.

[0060] Casein Kinase 1 Group

[0061] The CK1 family represents a distant branch of the protein kinase family. The hallmarks of protein kinase subdomains VIII and Ix are difficult to identify. One or more forms are ubiquitously distributed in mammalian tissues and cell lines. CK1 kinases are found in cytoplasm, in nuclei, membrane-bound, and associated with the cytoskeleton. Splice variants differ in their subcellular distribution. VRK is in this group.

[0062] TKL Group

[0063] This group includes integrin receptor kinase (IRAK), endoribonuclease-associated kinases (IRE); Mixed lineage kinase (MLK); LIM-domain containing kinase (LIMK); MOS; PIM; Receptor interacting kinase (RIP); SR-protein specific kinase (SRPK); RAF; Serine-threonine kinase receptors (STKR).

[0064] RIP2 is a serine-threonine kinase associated with the tumor necrosis factor (TNF) receptor complex and is implicated in the activation of NF-kappa B and cell death in mammalian cells. It has recently been demonstrated that RIP2 activates the MAPK pathway (Navas, et al., J. Biol. Chem. 1999 Nov. 19; 274(47): 33684-33690). RIP2 activates AP-1 and serum response element regulated expression by inducing the activation of the Elk1 transcription factor. RIP2 directly phosphorylates and activates ERK2 in vivo and in vitro. RIP2 in turn is activated through its interaction with Ras-activated Raf1. These results highlight the integrated nature of kinase signaling pathway.

[0065] “Other” Group

[0066] Several families cluster within a group of unrelated kinases termed “Other.” Group members that define smaller, yet distinct phylogenetic branches conventional kinases include CHK1; Elongation 2 factor kinases (EIFK); Calcium-calmodulin kinase kinases (CAMKK); IkB kinases (IKK); endoribonuclease-associated kinases (IRE); MOS; PIM; TAK1; Testis specific kinase (TSK); tousled-related kinase (TSL); UNC51-related kinase (UNC); WEE; mitotic kinases (BUB1, AURORA, PLK, and NIMA/NEK); several families that are close homologues to worm (C26C2.1, YQ09, ZC581.9, YFL033c, C24A1.3); Drosophila (SLOB), or yeast (YDOD_sp, YGR262_sc) kinases; and others that are “unique,” that is, those which do not cluster into any obvious family. Additional families are even less well defined and first were identified in lower eukaryotes such as yeast or worms (YNL020, YPL236, YQ09, YWY3, SCY1, C01H6.9, C26C2.1)

[0067] The tousled (TSL) kinase was first identified in the plant Arabidopsis thaliana. TSL encodes a serine/threonine kinase that is essential for proper flower development. Human tousled-like kinases (Tlks) are cell-cycle-regulated enzymes, displaying maximal activities during S phase. This regulated activity suggests that Tlk function is linked to ongoing DNA replication (Sillje, et al., EMBO J. 1999 Oct. 15; 18(20): 5691-5702).

[0068] BRSK Subfamily

[0069] The BRSK subfamily family of kinases includes the human BRSK1 and BRSK2, SAD-1 from C. elegans, CG6114 from Drosophila and the HrPOPK-1 gene from the primitive chordate Halocynthia roretzi. SAD-1 is expressed in neurons and required for presynaptic vesicle function (Crump et al. (2001) Neuron 29: 115-29). BRSK1 and BRSK2 are selectively expressed in brain, and HrPOPK-1 is selectively expressed in the nervous system, indicating that all members of this family have a neural function, specifically related to synaptic vesicle function.

[0070] The NRBP family includes human kinases NRBP1 and NRBP2, as well as homologs in C. elegans (H₃₇N_{21.1}) and D. melanogaster (LD28657). These kinases are most closely related in sequence to the WNK family of kinases, and may fulfill similar functions, including a role in hypertension.

[0071] Additionally, where BRSK2 is classsified as a member of the CAMKL family (p102), it should be further classified—i.e. “into the CAMK group, the CAMKL family and the BRSK family.”

[0072] Atypical Protein Kinase Group

[0073] There are several proteins with protein kinase activity that appear structurally unrelated to the eukaryotic protein kinases. These include; Dictyostelium myosin heavy chain kinase A (MHCKA), Physarum polycephalum actin-fragmin kinase, the human A6 PTK, human BCR, mitochondrial pyruvate dehydrogenase and branched chain fatty acid dehydrogenase kinase, and the prokaryptic “histidine” protein kinase family. The slime mold, worm, and human eEF-2 kinase homologues have all been demonstrated to have protein kinase activity, yet they bear little resemblance to conventional protein kinases except for the presence of a putative GxGxxG ATP-binding motif.

[0074] The so-called histidine kinases are abundant in prokaryotes, with more than 20 representatives in E. coli, and have also been identified in yeast, molds, and plants. In response to external stimuli, these kinases act as part of two-component systems to regulate DNA replication, cell division, and differentiation through phosphorylation of an aspartate in the target protein. To date, no “histidine” kinases have been identified in metazoans, although mitochondrial pyruvate dehydrogenase (PDK) and branched chain alpha-ketoacid dehydrogenase kinase (BCKD kinase), are related in sequence. PDK and BCKD kinase represent a unique family of atypical protein kinases involved in regulation of glycolysis, the citric acid cycle, and protein synthesis during protein malnutrition. Structurally they conserve only the C-terminal portion of “histidine” kinases including the G box regions. BCKD kinase phosphorylates the E1a subunit of the BCKD complex on Ser-293, proving it to be a functional protein kinase. Although no bona fide “histidine” kinase has yet been identified in humans, they do contain PDK.

[0075] Several other proteins contain protein kinase-like homology including: receptor guanylyl cyclases, diacylglycerol kinases, choline/ethanolamine kinases, and YLK1-related antibiotic resistance kinases. Each of these families contain short motifs that were recognized by our profile searches with low scoring E-values, but a priori would not be expected to function as protein kinases. Instead, the similarity could simply reflect the modular nature of protein evolution and the primal role of ATP binding in diverse phosphotransfer enzymes. However, two recent papers on a bacterial homologue of the YLK1 family suggests that the aminoglycoside phosphotransferases (APHs) are structurally and functionally related to protein kinases. There are over 40 APHs identified from bacteria that are resistant to aminoglycosides such as kanamycin, gentamycin, or amikacin. The crystal structure of one well characterized APH reveals that it shares greater than 40% structural identity with the 2 lobed structure of the catalytic domain of cAMP-dependent protein kinase (PKA), including an N-terminal lobe composed of a 5-stranded antiparallel beta sheet and the core of the C-terminal lobe including several invariant segments found in all protein kinases. APHs lack the GxGxxG normally present in the loop between beta strands 1 and 2 but contain 7 of the 12 strictly conserved residues present in most protein kinases, including the HGDxxxN signature sequence in kinase subdomain VIB. Furthermore, APH also has been shown to exhibit protein-serine/threonine kinase activity, suggesting that other YLK-related molecules may indeed be functional protein kinases.

[0076] The eukaryotic lipid kinases (PI3Ks, PI4Ks, and PIPKs) also contain several short motifs similar to protein kinases, but otherwise share minimal primary sequence similarity. However, once again structural analysis of PIPKII-beta defines a conserved ATP-binding core that is strikingly similar to conventional protein kinases. Three residues are conserved among all of these enzymes including (relative to the PKA sequence) Lys-72 which binds the gamma-phosphate of ATP, Asp-166 which is part of the HRDLK motif and Asp-184 from the conserved Mg⁺⁺ or Mn⁺⁺ binding DFG motif. The worm genome contains 12 phosphatidylinositol kinases, including 3 PI3-kinases, 2 P14-kinases, 3 PIP5-kinases, and 4 P13-kinase-related kinases. The latter group has 6 mammalian members (DNA-PK, SMG1, TRRAP, FRAP/TOR, ATM, and ATR), which have been shown to participate in the maintenance of genomic integrity in response to DNA damage, and exhibit true protein kinase activity, raising the possibility that other PI-kinases may also act as protein kinases. Regardless of whether they have true protein kinase activity, PI3-kinases are tightly linked to protein kinase signaling, as evidenced by their involvement downstream of many growth factor receptors and as upstream activators of the cell survival response mediated by the AKT protein kinase.

### SUMMARY OF THE INVENTION

[0077] The present invention relates, in part, to human protein kinases and protein kinase-like enzymes identified from genomic and cDNA sequencing.

[0078] Tyrosine and serine/threonine kinases (PTK's and STK's) have been identified and their protein sequence predicted as part of the instant invention. Mammalian members of these families were identified through the use of a bioinformatics strategy. The partial or complete sequences of these kinases are presented here, together with their classification.

[0079] One aspect of the invention features an identified, isolated, enriched, or purified nucleic acid molecule encoding a kinase polypeptide having an amino acid sequence selected from the group consisting of those set forth in SEQ ID NO: 67 through SEQ ID NO: 132.

[0080] The term “identified” in reference to a nucleic acid means that a sequence was selected from a genomic, EST, or cDNA sequence database based on it being predicted to encode a portion of a previously unknown or novel protein kinase.

[0081] By “isolated,” in reference to nucleic acid, is meant a polymer of 10, 15, or 18 (preferably 21, more preferably 39, most preferably 75) or more nucleotides conjugated to each other, including DNA and RNA that is isolated from a natural source or that is synthesized as the sense or complementary antisense strand. In certain embodiments of the invention, longer nucleic acids are preferred, for example those of 100, 200, 300, 400, 500, 600, 900, 1200, 1500, or more nucleotides and/or those having at least 50%, 60%, 75%, 80%, 85%, 90%, 91%, 92%, 93%, 94%, 95%, 96%, 97%, 98%, 99% or 100% identity to a sequence selected from the group consisting of those set forth in SEQ ID NO: 1 through SEQ ID NO: 66 or encoding for amino acid selected from SEQ ID NO: 67 through 132.

[0082] The isolated nucleic acid of the present invention is unique in the sense that it is not found in a pure or separated state in nature. Use of the term “isolated” indicates that a naturally occurring sequence has been removed from its normal cellular (i.e., chromosomal) environment. Thus, the sequence may be in a cell-free solution or placed in a different cellular environment. The term does not imply that the sequence is the only nucleotide chain present, but that it is essentially free (about 90-95% pure at least) of non-nucleotide material naturally associated with it, and thus is distinguished from isolated chromosomes.

[0083] By the use of the term “enriched” in reference to nucleic acid is meant that the specific DNA or RNA sequence constitutes a significantly higher fraction (2- to 5-fold) of the total DNA or RNA present in the cells or solution of interest than in normal or diseased cells or in the cells from which the sequence was taken. This could be caused by a person by preferential reduction in the amount of other DNA or RNA present, or by a preferential increase in the amount of the specific DNA or RNA sequence, or by a combination of the two. However, it should be noted that enriched does not imply that there are no other DNA or RNA sequences present, just that the relative amount of the sequence of interest has been significantly increased. The term “significant” is used to indicate that the level of increase is useful to the person making such an increase, and generally means an increase relative to other nucleic acids of about at least 2-fold, more preferably at least 5- to 10-fold or even more. The term also does not imply that there is no DNA or RNA from other sources. The DNA from other sources may, for example, comprise DNA from a yeast or bacterial genome, or a cloning vector such as pUC19. This term distinguishes from naturally occurring events, such as viral infection, or tumor-type growths, in which the level of one mRNA may be naturally increased relative to other species of mRNA. That is, the term is meant to cover only those situations in which a person has intervened to elevate the proportion of the desired nucleic acid.

[0084] It is also advantageous for some purposes that a nucleotide sequence be in purified form. The term “purified” in reference to nucleic acid does not require absolute purity (such as a homogeneous preparation). Instead, it represents an indication that the sequence is relatively more pure than in the natural environment (compared to the natural level this level should be at least 2- to 5-fold greater, e.g., in terms of mg/mL). Individual clones isolated from a cDNA library may be purified to electrophoretic homogeneity. The claimed DNA molecules obtained from these clones could be obtained directly from total DNA or from total RNA. The cDNA clones are not naturally occurring, but rather are preferably obtained via manipulation of a partially purified naturally occurring substance (messenger RNA). The construction of a cDNA library from mRNA involves the creation of a synthetic substance (cDNA) and pure individual cDNA clones can be isolated from the synthetic library by clonal selection of the cells carrying the cDNA library. Thus, the process which includes the construction of a cDNA library from mRNA and isolation of distinct cDNA clones yields an approximately 10⁶-fold purification of the native message. Thus, purification of at least one order of magnitude, preferably two or three orders, and more preferably four or five orders of magnitude is expressly contemplated.

[0085] By a “kinase polypeptide” is meant 32 (preferably 40, more preferably 45, most preferably 55) or more contiguous amino acids in a polypeptide having an amino acid sequence selected from the group consisting of those set forth in SEQ ID NO: 67 through SEQ ID NO: 132. In certain aspects, polypeptides of 75, 100, 200, 300, 400, 450, 500, 550, 600, 700, 800, 900 or more amino acids are preferred. The kinase polypeptide can be encoded by a full-length nucleic acid sequence or any portion (e.g., a “fragment” as defined herein) of the full-length nucleic acid sequence, so long as a functional activity of the polypeptide is retained, including, for example, a catalytic domain, as defined herein, or a portion thereof. One of skill in the art would be able to select those catalytic domains, or portions thereof, which exhibit a kinase or kinase-like activity, e.g., catalytic activity, as defined herein. It is well known in the art that due to the degeneracy of the genetic code numerous different nucleic acid sequences can code for the same amino acid sequence. Equally, it is also well known in the art that conservative changes in amino acid can be made to arrive at a protein or polypeptide which retains the functionality of the original. Such substitutions may include the replacement of an amino acid by a residue having similar physicochemical properties, such as substituting one aliphatic residue (Ile, Val, Leu or Ala) for another, or substitution between basic residues Lys and Arg, acidic residues Glu and Asp, amide residues Gln and Asn, hydroxyl residues Ser and Tyr, or aromatic residues Phe and Tyr. Further information regarding making amino acid exchanges which have only slight, if any, effects on the overall protein can be found in Bowie et al., Science, 1990, 247, 1306-1310, which is incorporated herein by reference in its entirety including any figures, tables, or drawings. In all cases, all permutations are intended to be covered by this disclosure.

[0086] The amino acid sequence of a kinase peptide of the invention will be substantially similar to a sequence having an amino acid sequence selected from the group consisting of those set forth in SEQ ID NO: 67 through SEQ ID NO: 132, or the corresponding full-length amino acid sequence, or fragments thereof.

[0087] A sequence that is substantially similar to a sequence selected from the group consisting of those set forth in SEQ ID NO: 67 through SEQ ID NO: 132, will preferably have at least 70%, 80%, 85%, 90%, 91%, 92%, 93%, 94%, 95%, 96%, 97%, 98%, 99% or 100% identity to the sequence.

[0088] By “identity” is meant a property of sequences that measures their similarity or relationship. Identity is measured by dividing the number of identical residues by the total number of residues and gaps and multiplying the product by 100. “Gaps” are spaces in an alignment that are the result of additions or deletions of amino acids. Thus, two copies of exactly the same sequence have 100% identity, but sequences that are less highly conserved, and have deletions, additions, or replacements, may have a lower degree of identity. Those skilled in the art will recognize that several computer programs are available for determining sequence identity using standard parameters, for example Gapped BLAST or PSI-BLAST (Altschul, et al. (1997) Nucleic Acids Res. 25: 3389-3402), BLAST (Altschul, et al. (1990) J. Mol. Biol. 215: 403-410), and Smith-Waterman (Smith, et al. (1981) J. Mol. Biol. 147: 195-197). Preferably, the default settings of these programs will be employed, but those skilled in the art recognize whether these settings need to be changed and know how to make the changes.

[0089] “Similarity” is measured by dividing the number of identical residues plus the number of conservatively substituted residues (see Bowie, et al. Science, 1999), 247, 1306-1310, which is incorporated herein by reference in its entirety, including any drawings, figures, or tables) by the total number of residues and gaps and multiplying the product by 100.

[0090] In preferred embodiments, the invention features isolated, enriched, or purified nucleic acid molecules encoding a kinase polypeptide comprising a nucleotide sequence that: (a) encodes a polypeptide having an amino acid sequence selected from the group consisting of those set forth in SEQ ID NO: 67 through SEQ ID NO: 132 or an amino acid sequence having at least about 90% identical to a sequence selected from the group consisting of SEQ ID NO: 67 through SEQ ID NO: 132; (b) is the complement of the nucleotide sequence of (a); (c) hybridizes under highly stringent conditions to the nucleotide molecule of (a) and encodes a naturally occurring kinase polypeptide; (d) encodes a polypeptide having an amino acid sequence selected from the group consisting of those set forth in SEQ ID NO: 67 through SEQ ID NO: 132, except that it lacks one or more, but not all, of the domains selected from the group consisting of the protein kinase, CNH, PH, phobol esters/diacylglycerol binding (C1), protein kinase C-terminal, PDZ (also known as DHR or GLGF), kinase associated domain 1, UBA/TS-N, U13A, armadillo/beta-catenin-like repeat, POLO box duplicated region, P21-Rho-binding, immunoglobulin, WIF, leucine rich repeat, SH3, MYND, EF hand, and bromodomain; (e) encodes a polypeptide having an amino acid sequence selected from the group consisting of those set forth in SEQ ID NO: 67 through SEQ ID NO: 132, except that it lacks one or more, but not all, of the regions selected from the C-terminal region, the N-terminal region, a spacer region, and the catalytic domain; and (f) is the complement of the nucleotide sequence of (d) or (e).

[0091] The invention includes an antibody or antibody fragment having specific binding affinity to a kinase polypeptide or to a domain of said polypeptide, wherein said polypeptide comprises an amino acid sequence selected from those set forth in SEQ ID NO: 67 through 132, a hybridoma which produces the such an antibody or antibody fragment, a kit comprising such an antibody which binds to a polypeptide of the invention a negative control antibody.

[0092] The invention includes a method for identifying a substance that modulates the activity of a kinase polypeptide comprising the steps of: (a) contacting the kinase polypeptide substantially identical to an amino acid sequence selected from the group consisting of those set forth in SEQ ID NO: 67 through 132 with a test substance; (b) measuring the activity of said polypeptide; and (c) determining whether said substance modulates the activity of said polypeptide.

[0093] The invention also includes a method for identifying a substance that modulates the activity of a kinase polypeptide in a cell comprising the steps of: expressing a kinase polypeptide having a sequence substantially identical to an amino acid sequence selected from the group consisting of those set forth in SEQ ID NO: 67 through 132; adding a test substance to said cell; and monitoring a change in cell phenotype or the interaction between said polypeptide and a natural binding partner.

[0094] The invention includes a method for treating a disease or disorder by administering to a patient in need of such treatment a substance that modulates the activity of a kinase substantially identical to an amino acid sequence selected from the group consisting of those set forth in SEQ ID NO: 67 through 132.

[0095] The treatment methods of the invention include the disease or disorder is selected from the group consisting of cancers, immune-related diseases and disorders, cardiovascular disease, brain or neuronal-associated diseases, metabolic disorders and inflammatory disorders; and the disease or disorder selected from the group consisting of cancers of tissues; cancers of blood or hematopoietic origin; cancers of the breast, colon, lung, prostate, cervix, brain, ovaries, bladder or kidney. The treatment methods also include the disease or disorder is selected from the group consisting of disorders of the central or peripheral nervous system; migraines; pain; sexual dysfunction; mood disorders; attention disorders; cognition disorders; hypotension; hypertension; psychotic disorders; neurological disorders and dyskinesias. Treatment methods also include disease or disorder selected from the group consisting of inflammatory disorders including rheumatoid arthritis, chronic inflammatory bowel disease, chronic inflammatory pelvic disease, multiple sclerosis, asthma, osteoarthritis, psoriasis, atherosclerosis, rhinitis, autoimmunity and organ transplant rejection.

[0096] The methods of the invention contemplate use of a substance that modulates kinase activity in vitro, including kinase inhibitors.

[0097] The invention includes a method for detection of a kinase polypeptide in a sample as a diagnostic tool for a disease or disorder, wherein said method comprises:

[0098] (a) contacting said sample with a nucleic acid probe which hybridizes under hybridization assay conditions to a nucleic acid target region of a kinase polypeptide having an amino acid sequence selected from the group consisting of those set forth in SEQ ID NO: 67 through 132, said probe comprising the nucleic acid sequence, fragments thereof, or the complements of said sequences and fragments; and

[0099] (b) detecting the presence or amount of the target region: probe hybrids as an indication of said disease or disorder.

[0100] Such a detection method includes a disease or disorder selected from the group consisting of cancers, immune-related diseases and disorders, cardiovascular disease, brain or neuronal-associated diseases, metabolic disorders and inflammatory disorders; a disease or disorder selected from the group consisting of cancers of tissues; cancers of blood or hematopoietic origin; cancers of the breast, colon, lung, prostate, cervix, brain, ovary, bladder or kidney; a disease or disorder is selected from the group consisting of central or peripheral nervous system disease, migraines, pain; sexual dysfunction; mood disorders; attention disorders; cognition disorders; hypotension; hypertension; psychotic disorders; neurological disorders and dyskinesias; a disease or disorder is selected from the group consisting of inflammatory disorders including rheumatoid arthritis, chronic inflammatory bowel disease, chronic inflammatory pelvic disease, multiple sclerosis, asthma, osteoarthritis, psoriasis, atherosclerosis rhinitis, autoimmunity, and organ transplant rejection.

[0101] The invention includes an isolated, enriched or purified nucleic acid molecule that comprises a nucleic molecule encoding a domain of a kinase polypeptide having a sequence of SEQ ID NO: 67-132.

[0102] The invention includes an isolated, enriched or purified nucleic acid molecule encoding a kinase polypeptide which comprises a nucleotide sequence that encodes a polypeptide having an amino acid sequence that has at least 90% identity to a polypeptide set forth in SEQ ID NO: 67-132.

[0103] The invention includes an isolated, enriched or purified nucleic acid molecule according wherein the molecule comprises a nucleotide sequence substantially identical to a sequence of SEQ ID NO: 1-66.

[0104] The invention includes an isolated, enriched or purified nucleic acid molecule consisting essentially of about 10-30 contiguous nucleotide bases of a nucleic acid sequence that encodes a polypeptide selected from the group consisting of SEQ ID NO: 67 through 132. The invention also includes an isolated, enriched or purified nucleic acid molecule of about 10-30 contiguous nucleotide bases of a nucleic acid sequence that encodes a polypeptide selected from the group consisting of SEQ ID NO: 67 through 132, consisting essentially of about 10-30 contiguous nucleotide bases of a nucleic acid sequence selected from the group consisting of SEQ ID NO: 1 through 66.

[0105] The term “complement” refers to two nucleotides that can form multiple favorable interactions with one another. For example, adenine is complementary to thymine as they can form two hydrogen bonds. Similarly, guanine and cytosine are complementary since they can form three hydrogen bonds. A nucleotide sequence is the complement of another nucleotide sequence if all of the nucleotides of the first sequence are complementary to all of the nucleotides of the second sequence.

[0106] Various low or high stringency hybridization conditions may be used depending upon the specificity and selectivity desired. These conditions are well known to those skilled in the art. Under stringent hybridization conditions only highly complementary nucleic acid sequences hybridize. Preferably, such conditions prevent hybridization of nucleic acids having more than 1 or 2 mismatches out of 20 contiguous nucleotides, more preferably, such conditions prevent hybridization of nucleic acids having more than 1 or 2 mismatches out of 50 contiguous nucleotides, most preferably, such conditions prevent hybridization of nucleic acids having more than 1 or 2 mismatches out of 100 contiguous nucleotides. In some instances, the conditions may prevent hybridization of nucleic acids having more than 5 mismatches in the full-length sequence.

[0107] By stringent hybridization assay conditions is meant hybridization assay conditions at least as stringent as the following: hybridization in 50% formamide, 5×SSC, 50 mM NaH2PO4, pH 6.8, 0.5% SDS, 0.1 mg/mL sonicated salmon sperm DNA, and 5× Denhardt's solution at 42° C. overnight; washing with 2×SSC, 0.1% SDS at 45° C.; and washing with 0.2×SSC, 0.1% SDS at 45° C. Under some of the most stringent hybridization assay conditions, the second wash can be done with 0.1×SSC at a temperature up to 70° C. (Berger et al. (1987) Guide to Molecular Cloning Techniques pg 421, hereby incorporated by reference herein in its entirety including any figures, tables, or drawings.). However, other applications may require the use of conditions falling between these sets of conditions. Methods of determining the conditions required to achieve desired hybridizations are well known to those with ordinary skill in the art, and are based on several factors, including but not limited to, the sequences to be hybridized and the samples to be tested. Washing conditions of lower stringency frequently utilize a lower temperature during the washing steps, such as 65° C., 60° C., 55° C., 50° C., or 42° C.

[0108] The term “domain” refers to a region of a polypeptide whose sequence or structure is conserved between several homologs of the polypeptide and which serves a particular function. Many domains may be identified by searching the Pfam database of domain models (http://pfam.wustl.edu) which provides coordinates on the polypeptide delimiting the start and end of the domain, as well as a score giving the likelihood that the domain is present in the polypeptide. Other domains may be identified by specialized programs, such as the COILS program to detect colied-coil regions (http://www.ch.embnet.orp/software/COILS_form.html), the SignalP program to detect signal peptides (http://www.ebs.dtu.dk/services/TMIIMM), by visual inspection of the amino acid sequence (e.g., determination of cysteine-rich or proline-rich domains), or by Smith-Waterman alignment shows a high level of sequence similarity in the region containing the domain, it may be concluded that the domain is present in both proteins within that region. which serves a particular function.

[0109] Domains of signal transduction proteins can serve functions including, but not limited to, binding molecules that localize the signal transduction molecule to different regions of the cell, binding other signaling molecules directly responsible for propagating a particular cellular signal or binding molecules that influence the function of the protein. Some domains can be expressed separately from the rest of the protein and function by themselves

[0110] The term “N-terminal region” refers to the extracatalytic region located between the initiator methionine and the catalytic domain of the protein kinase. Depending on its length, the N-terminal region may or may not play a regulatory role in kinase function. An example of a protein kinase whose N-terminal domain has been shown to play a regulatory role is PAK6 or PAK5, which contains a CRIB motif used for Cdc42 and rac binding (Burbelo, P. D. et al. (1995) J. Biol. Chem. 270, 29071-29074). Such an N-terminal region is also termed a N-terminal functional domain or N-terminal domain.

[0111] The term “catalytic domain” or protein kinase domain refers to a region of the protein kinase that is typically 25-300 amino acids long and is responsible for carrying out the phosphate transfer reaction from a high-energy phosphate donor molecule such as ATP or GTP to itself (autophosphorylation) or to other proteins (exogenous phosphorylation). The catalytic domain of protein kinases is made up of 12 subdomains that contain highly conserved amino acid residues, and are responsible for proper polypeptide folding and for catalysis. The catalytic domain can be defined with reference to the parameters described in a “Pfam” database: http://pfam.wustl.edu. In particular, it can be defined with reference to a HMMer search of the Pfam database. In the N-terminal extremity of the catalytic domain there is a glycine rich stretch of residues in the vicinity of a lysine residue, which has been shown to be involved in ATP binding. In the central part of the catalytic domain there is a conserved aspartic acid residue which is important for the catalytic activity of the enzyme. See Accession number PF00069 of http://pfam.wustl.edu.

[0112] The term “catalytic activity,” as used herein, defines the rate at which a kinase catalytic domain phosphorylates a substrate. Catalytic activity can be measured, for example, by determining the amount of a substrate converted to a phosphorylated product as a function of time. Catalytic activity can be measured by methods of the invention by determining the concentration of a phosphorylated substrate after a fixed period of time. Phosphorylation of a substrate occurs at the active site of a protein kinase. The active site is normally a cavity in which the substrate binds to the protein kinase and is phosphorylated.

[0113] The term “substrate” as used herein refers to a molecule phosphorylated by a kinase of the invention. Kinases phosphorylate substrates on serine/threonine or tyrosine amino acids. The molecule may be another protein or a polypeptide.

[0114] The term “C-terminal region” refers to the region located between the catalytic domain or the last (located closest to the C-terminus) functional domain and the carboxy-terminal amino acid residue of the protein kinase. See Accession number PF00433 of http://pfam.wustl.edu. Depending on its length and amino acid composition, the C-terminal region may or may not play a regulatory role in kinase function. An example of a protein kinase whose C-terminal region may play a regulatory role is PAK3 which contains a heterotrimeric G_{b} subunit-binding site near its C-terminus (Leeuw, T. et al. (1998) Nature, 391, 191-195). Such a C-terminal region is also termed a C-terminal functional domain or C-terminal domain.

[0115] By “functional” domain is meant any region of the polypeptide that may play a regulatory or catalytic role as predicted from amino acid sequence homology to other proteins or by the presence of amino acid sequences that may give rise to specific structural conformations.

[0116] The “CNH domain” is the citron homology domain, and is often found after cysteine rich and pleckstrin homology (PH) domains at the C-terminal end of the proteins [MEDLINE: 99321922]. It acts as a regulatory domain and could be involved in macromolecular interactions [MEDLINE: 99321922], [MEDLINE: 97280817]. See Accession number PF00780 of http://pfam.wustl.edu.

[0117] The “PH domain” is the ‘pleckstrin homology’ (PH) domain and is a domain of about 100 residues that occurs in a wide range of proteins involved in intracellular-signaling or as constituents of the cytoskeleton [MEDLINE: 93272305], [MEDLINE: 93268380], [MEDLINE: 94054654], [MEDLINE: 95076505], [MEDLINE: 95157628], [MEDLINE: 95197706], [MEDLINE: 96082954]. See Accession number PF00169 of http://pfam.wustl.edu.

[0118] The “Phorbol esters/diacylglycerol binding domain” is also known as the Protein kinase C conserved region 1 (C1) domain. The N-terminal region of PKC, known as C1, has been shown [MEDLINE: 89296905] to bind PE and DAG in a phospholipid and zinc-dependent fashion. The C1 region contains one or two copies (depending on the isozyme of PKC) of a cysteine-rich domain about 50 amino-acid residues long and essential for DAG/PE-binding. The DAG/PE-binding domain binds two zinc ions; the ligands of these metal ions are probably the six cysteines and two histidines that are conserved in this domain. See Accession number PF00130 of http://pfam.wustl.edu.

[0119] The “PDZ domain” is also known as the DHR or GLGF domain. PDZ domains are found in diverse signaling proteins and may function in targeting signalling molecules to sub-membranous sites [MEDLINE: 97348826]. See Accession number PF00595 of http://pfam.wustl.edu.

[0120] The “kinase associated domain 1” (KA1) domain is found in the C-terminal extremity of various serine/threonine-protein kinases from fungi, plants and animals. See Accession number PF02149 of http://pfam.wustl.edu.

[0121] The UBA/TS-N domain is composed of three alpha helices. This family includes the previously defined UBA and TS-N domains. The UBA-domain (ubiquitin associated domain) is a sequence motif found in several proteins having connections to ubiquitin and the ubiquitination pathway. The structure of the UBA domain consists of a compact three helix bundle. This domain is found at the N terminus of EF-TS hence the name TS-N. The structure of EF-TS is known and this domain is implicated in its interaction with EF-TU. The domain has been found in non EF-TS proteins such as alpha-NAC P70670 and MJ0280 O57728 [1]. See Accession number PF00627 of http://pfam.wustl.edu.

[0122] The “UBA domain” The UBA-domain (ubiquitin associated domain) is a novel sequence motif found in several proteins having connections to ubiquitin and the ubiquitination pathway [MEDLINE: 97025177]. The UBA domain is probably a non-covalent ubiquitin binding domain consisting of a compact three helix bundle [MEDLINE: 99061330]. See Accession number PF00627 of http://pfam.wustl.edu.

[0123] The “armadillo/beta-catenin-like repeat” is an approximately 40 amino acid long tandemly repeated sequence motif first identified in the Drosophila segment polarity gene armadillo. Similar repeats were later found in the mammalian armadillo homolog beta-catenin, the junctional plaque protein plakoglobin, the adenomatous polyposis coli (APC) tumor suppressor protein, and a number of other proteins [MEDLINE: 94170379]. The 3 dimensional fold of an armadillo repeat is known from the crystal structure of beta-catenin [MEDLINE: 98449700]. There, the 12 repeats form a superhelix of alpha-helices, with three helices per unit. The cylindrical structure features a positively charged grove which presumably interacts with the acidic surfaces of the known interaction partners of beta-catenin. See Accession number PF00514 of http://pfam.wustl.edu.

[0124] The “POLO box duplicated region” (POLO box) is described as follows. A subgroup of serine/threonine protein kinases (IPR002290) playing multiple roles during cell cycle, especially in M phase progression and cytokinesis, contain a duplicated domain in their C terminal part, the polo box [MEDLINE: 99116035]. The domain is named after its founding member encoded by the polo gene of Drosophila [MEDLINE: 92084090]. This domain of around 70 amino acids has been found in species ranging from yeast to mammals. Point mutations in the Polo box of the budding yeast Cdc5 protein abolish the ability of overexpressed Cdc5 to interact with the spindle poles and to organize cytokinetic structures [MEDLINE: 20063188]. See Accession number PF00659 of http://pfam.wustl.edu.

[0125] The “P21-Rho-binding domain” is one of a group of small domains that bind Cdc42p- and/or Rho-like small GTPases. These are also known as the Cdc42/Rac interactive binding (CRIB). See Accession number PF00786 of http://pfam.wustl.edu.

[0126] The “immunoglobulin domain” is a domain that is under the umbrella of the immunoglobulin superfamily. Examples of the superfamily include antibodies, the giant muscle kinase titin and receptor tyrosine kinases. Immunoglobulin-like domains may be involved in protein-protein and protein-ligand interactions. The Pfam alignments do not include the first and last strand of the immunoglobulin-like domain. See Accession number PF00047 of http://pfam.wustl.edu.

[0127] The “WIF domain” is found in the RYK tyrosine kinase receptors and WIF the Wnt-inhibitory-factor. The domain is extracellular and contains two conserved cysteines that may form a disulphide bridge. This domain is Wnt binding in WIF, and it has been suggested that RYK may also bind to Wnt [MEDLINE: 20105592]. See Accession number PF02019 of http://pfam.wustl.edu.

[0128] The “leucine rich repeat”—Leucine-rich repeats (LRRs) are relatively short motifs (22-28 residues in length) found in a variety of cytoplasmic, membrane and extracellular proteins [MEDLINE: 91099665]. Although these proteins are associated with widely different functions, a common property involves protein-protein interaction. Other functions of LRR-containing proteins include, for example, binding to enzymes [MEDLINE: 90094386] and vascular repair [MEDLINE: 89367331]. See Accession number PF00560 of http://pfam.wustl.edu.

[0129] The “SH3 domain” SH3 (src Homology-3) domains are small protein modules containing approximately 50 amino acid residues [PUB000025]. They are found in a variety of proteins with enzymatic activity. The SH3 domain has a characteristic fold which consists of five or six beta-strands arranged as two tightly packed anti-parallel beta sheets. The linker regions may contain short helices [PUB00001083]. See Accession number PF00018 of http://pfam.wustl.edu.

[0130] The “MYND finger” is a domain found in some suppressors of cell cycle entry [MEDLINE: 96203118], [MEDLINE: 98079069]. The MYND zinc finger (ZnF) domain is one of two domains in AML/ETO fusion protein required for repression of basal transcription from the multidrug resistance 1 (MDR-1) promoter. The other domain is a hydrophobic heptad repeat (HHR) motif [MEDLINE: 98252948]. The AML-1/ETO fusion protein is created by the (8; 21) translocation, the second most frequent chromosomal abnormality associated with acute myeloid leukemia. In the fusion protein the AML-1 runt homology domain, which is responsible for DNA binding and CBF beta interaction, is linked to ETO, a gene of unknown function [MEDLINE: 96068903]. See Accession number PF01753 of http://pfam.wustl.edu.

[0131] The “EF hand” domain is described as follows: many calcium-binding proteins belong to the same evolutionary family and share a type of calcium-binding domain known as the EF-hand. This type of domain consists of a twelve residue loop flanked on both side by a twelve residue alpha-helical domain. In an EF-hand loop the calcium ion is coordinated in a pentagonal bipyramidal configuration. The six residues involved in the binding are in positions 1, 3, 5, 7, 9 and 12; these residues are denoted by X, Y, Z, −Y, −X and −Z. The invariant Glu or Asp at position 12 provides two oxygens for liganding Ca (bidentate ligand). See Accession number PF00036 of http://pfam.wustl.edu.

[0132] A “bromodomain” is a 110 amino acid long domain, found in many chromatin associated proteins. Bromodomains can interact specifically with acetylated lysine. [MEDLINE: 97318593] Bromodomains are found in a variety of mammalian, invertebrate and yeast DNA-binding proteins [MEDLINE: 92285152]. The bromodomain may occur as a single copy, or in duplicate. The bromodomain may be involved in protein-protein interactions and may play a role in assembly or activity of multi-component complexes involved in transcriptional activation [MEDLINE: 96022440]. See Accession number PF00439 of http://pfam.wustl.edu.

[0133] The term “coiled-coil structure region” as used herein, refers to a polypeptide sequence that has a high probability of adopting a coiled-coil structure as predicted by computer algorithms such as COILS (Lupas, A. (1996) Meth. Enzymology 266: 513-525). Coiled-coils are formed by two or three amphipathic α-helices in parallel. Coiled-coils can bind to coiled-coil domains of other polypeptides resulting in homo- or heterodimers (Lupas, A. (1991) Science 252: 1162-1164). Coiled-coil-dependent oligomerization has been shown to be necessary for protein function including catalytic activity of serine/threonine kinases (Roe, J. et al. (1997) J. Biol. Chem. 272: 5838-5845).

[0134] The term “proline-rich region” as used herein, refers to a region of a protein kinase whose proline content over a given amino acid length is higher than the average content of this amino acid found in proteins (i.e., >10%). Proline-rich regions are easily discernable by visual inspection of amino acid sequences and quantitated by standard-computer sequence analysis programs such as the DNAStar program EditSeq. Proline-rich regions have been demonstrated to participate in regulatory protein-protein interactions. Among these interactions, those that are most relevant to this invention involve the “PxxP” proline rich motif found in certain protein kinases (i.e., human PAK1) and the SH3 domain of the adaptor molecule Nck (Galisteo, M. L. et al. (1996) J. Biol. Chem. 271: 20997-21000). Other regulatory interactions involving “PxxP” proline-rich motifs include the WW domain (Sudol, M. (1996) Prog. Biochys. Mol. Bio. 65: 113-132).

[0135] The term “spacer region” as used herein, refers to a region of the protein kinase located between predicted functional domains. The spacer region has little conservation when compared with any amino acid sequence in the database, and can be identified by using a Smith-Waterman alignment of the protein sequence against the non-redundant protein of Pfam database to define the C- and N-terminal boundaries of the flanking functional domains. Spacer regions may or may not play a fundamental role in protein kinase function. Precedence for the regulatory role of spacer regions in kinase function is provided by the role of the src kinase spacer in inter-domain interactions (Xu, W. et al. (1997) Nature 385: 595-602).

[0136] The term “insert” as used herein refers to a portion of a protein kinase that is absent from a close homolog. Inserts may or may not by the product alternative splicing of exons. Inserts can be identified by using a Smith-Waterman sequence alignment of the protein sequence against the non-redundant protein database, or by means of a multiple sequence alignment of homologous sequences using the DNAStar program Megalign. Inserts may play a functional role by presenting a new interface for protein-protein interactions, or by interfering with such interactions.

[0137] The term “signal transduction pathway” refers to the molecules that propagate an extracellular signal through the cell membrane to become an intracellular signal. This signal can then stimulate a cellular response. The polypeptide molecules involved in signal transduction processes are typically receptor and non-receptor protein kinases, receptor and non-receptor protein phosphatases, polypeptides containing SRC homology 2 and 3 domains, phosphotyrosine binding proteins (SRC homology 2 (SH2) and phosphotyrosine binding (PTB and PH) domain containing proteins), proline-rich binding proteins (SH3 domain containing proteins), GTPases, phosphodiesterases, phospholipases, prolyl isomerases, proteases, Ca2+ binding proteins, cAMP binding proteins, guanyl cyclases, adenylyl cyclases, NO generating proteins, nucleotide exchange factors, and transcription factors.

[0138] In other preferred embodiments, the invention features isolated, enriched, or purified nucleic acid molecules encoding kinase polypeptides, further comprising a vector or promoter effective to initiate transcription in a host cell. The nucleic acid may encode a polypeptide of SEQ ID NO: 67-132 and a vector or promoter effective to initiate transcription in a host cell. The invention includes such nucleic acid molecules that are isolated, enriched, or purified from a mammal and in a preferred embodiment, the mammal is a human. The invention also features recombinant nucleic acid, preferably in a cell or an organism. The recombinant nucleic acid may contain a sequence selected from the group consisting of those set forth in SEQ ID NO: 1 through SEQ ID NO: 66, or a functional derivative thereof and a vector or a promoter effective to initiate transcription in a host cell. The recombinant nucleic acid can alternatively contain a transcriptional initiation region functional in a cell, a sequence complementary to an RNA sequence encoding a kinase polypeptide and a transcriptional termination region functional in a cell. Specific vectors and host cell combinations are discussed herein.

[0139] The term “vector” relates to a single or double-stranded circular nucleic acid molecule that can be transfected into cells and replicated within or independently of a cell genome. A circular double-stranded nucleic acid molecule can be cut and thereby linearized upon treatment with restriction enzymes. An assortment of nucleic acid vectors, restriction enzymes, and the knowledge of the nucleotide sequences cut by restriction enzymes are readily available to those skilled in the art. A nucleic acid molecule encoding a kinase can be inserted into a vector by cutting the vector with restriction enzymes and ligating the two pieces together.

[0140] The term “transfecting” defines a number of methods to insert a nucleic acid vector or other nucleic acid molecules into a cellular organism. These methods involve a variety of techniques, such as treating the cells with high concentrations of salt, an electric field, detergent, or DMSO to render the outer membrane or wall of the cells permeable to nucleic acid molecules of interest or use of various viral transduction strategies.

[0141] The term “promoter” as used herein, refers to nucleic acid sequence needed for gene sequence expression. Promoter regions vary from organism to organism, but are well known to persons skilled in the art for different organisms. For example, in prokaryotes, the promoter region contains both the promoter (which directs the initiation of RNA transcription) as well as the DNA sequences which, when transcribed into RNA, will signal synthesis initiation. Such regions will normally include those 5′-non-coding sequences involved with initiation of transcription and translation, such as the TATA box, capping sequence, CAAT sequence, and the like.

[0142] In preferred embodiments, the isolated nucleic acid comprises, consists essentially of, or consists of a nucleic acid sequence selected from the group consisting of those set forth in SEQ ID NO: 1 through SEQ ID NO: 66, which encodes an amino acid sequence selected from the group consisting of those set forth in SEQ ID NO: 67 through SEQ ID NO: 132, a functional derivative thereof, or at least 35, 40, 45, 50, 60, 75, 100, 200, or 300 contiguous amino acids selected from the group consisting of those set forth in SEQ ID NO: 67 through SEQ ID NO: 132, the catalytic region of SEQ ID NO: 67-132 or catalytic domains, functional domains, or spacer regions of SEQ ID NO: 67 through 132. The nucleic acid may be isolated from a natural source by cDNA cloning or by subtractive hybridization. The natural source may be mammalian, preferably human, preferably blood, semen or tissue, and the nucleic acid may be synthesized by the triester method or by using an automated DNA synthesizer.

[0143] The term “mammal” refers preferably to such organisms as mice, rats, rabbits, guinea pigs, sheep, and goats, more preferably to cats, dogs, monkeys, and apes, and most preferably to humans.

[0144] In yet other preferred embodiments, the nucleic acid is a conserved or unique region, for example those useful for: the design of hybridization probes to facilitate identification and cloning of additional polypeptides, the design of PCR probes to facilitate cloning of additional polypeptides, obtaining antibodies to polypeptide regions, and designing antisense oligonucleotides.

[0145] By “conserved nucleic acid regions,” are meant regions present on two or more nucleic acids encoding a kinase polypeptide, to which a particular nucleic acid sequence can hybridize under lower stringency conditions. Examples of lower stringency conditions suitable for screening for nucleic acid encoding kinase polypeptides are provided in Wahl et al. Meth. Enzym. 152: 399-407 (1987) and in Wahl et al. Meth. Enzym. 152: 415-423 (1987), which are hereby incorporated by reference herein in its entirety, including any drawings, figures, or tables. Preferably, conserved regions differ by no more than 5 out of 20 nucleotides, even more preferably 2 out of 20 nucleotides or most preferably 1 out of 20 nucleotides.

[0146] By “unique nucleic acid region” is meant a sequence present in a nucleic acid coding for a kinase polypeptide that is not present in a sequence coding for any other naturally occurring polypeptide. Such regions preferably encode 32 (preferably 40, more preferably 45, most preferably 55) or more contiguous amino acids, for example, an amino acid sequence selected from the group consisting of those set forth in SEQ ID NO: 67 through SEQ ID NO: 132. In particular, a unique nucleic acid region is preferably of mammalian origin.

[0147] Another aspect of the invention features a nucleic acid probe for the detection of nucleic acid encoding a kinase polypeptide having an amino acid sequence selected from the group consisting of those set forth in SEQ ID NO: 67 through SEQ ID NO: 132, catalytic domains, functional domains, or spacer regions of SEQ ID NO: 67 through 132, in a sample. The nucleic acid probe contains a nucleotide base sequence that will hybridize to the sequence selected from the group consisting of those set forth in SEQ ID NO: 1 through SEQ ID NO: 66, a sequence encoding catalytic domains, functional domains, or spacer regions of SEQ ID NO: 67 through 132, or a functional derivative thereof.

[0148] In preferred embodiments, the nucleic acid probe hybridizes to nucleic acid encoding at least 12, 32, 75, 90, 105, 120, 150, 200, 250, 300 or 350 contiguous amino acids, wherein the nucleic acid sequence is selected from the group consisting of SEQ ID NO: 1 through SEQ ID NO: 66, or a functional derivative thereof.

[0149] Methods for using the probes include detecting the presence or amount of kinase RNA in a sample by contacting the sample with a nucleic acid probe under conditions such that hybridization occurs and detecting the presence or amount of the probe bound to kinase RNA. The nucleic acid duplex formed between the probe and a nucleic acid sequence coding for a kinase polypeptide may be used in the identification of the sequence of the nucleic acid detected (Nelson et al., in Nonisotopic DNA Probe Techniques, Academic Press, San Diego, Kricka, ed., p. 275, 1992, hereby incorporated by reference herein in its entirety, including any drawings, figures, or tables). Kits for performing such methods may be constructed to include a container means having disposed therein a nucleic acid probe.

[0150] Methods for using the probes also include using these probes to find, for example, the full-length clone of each of the predicted kinases by techniques known to one skilled in the art. These clones will be useful for screening for small molecule compounds that inhibit the catalytic activity of the encoded kinase with potential utility in treating cancers, immune-related diseases and disorders, cardiovascular disease, brain or neuronal-associated diseases, and metabolic disorders. More specifically disorders including cancers of tissues or blood, or hematopoietic origin, particularly those involving breast, colon, lung, prostate, cervix; skin, brain, ovary, bladder, or kidney; central or peripheral nervous system diseases and conditions including migraine, pain, sexual dysfunction, mood disorders, attention disorders, cognition disorders, hypotension, and hypertension; psychotic and neurological disorders, including anxiety, schizophrenia, manic depression, delirium, dementia, severe mental retardation and dyskinesias, such as Huntington's disease or Tourette's Syndrome; neurodegenerative diseases including Alzheimer's, Parkinson's, multiple sclerosis, and amyotrophic lateral sclerosis; viral or non-viral infections caused by HIV-1, HIV-2 or other viral- or prion-agents or fungal- or bacterial-organisms; metabolic disorders including Diabetes and obesity and their related syndromes, among others; cardiovascular disorders including reperfusion restenosis, hypertension, coronary thrombosis, clotting disorders, unregulated cell growth disorders, atherosclerosis; ocular disease including glaucoma, retinopathy, and macular degeneration; inflammatory disorders including rheumatoid arthritis, chronic inflammatory bowel disease, chronic inflammatory pelvic disease, multiple sclerosis, asthma, osteoarthritis, bone disorder, psoriasis, atherosclerosis, rhinitis, autoimmunity, and organ transplant rejection.

[0151] In another aspect, the invention describes a recombinant cell or tissue comprising a nucleic acid molecule encoding a kinase polypeptide having an amino acid sequence selected from the group consisting of those set forth in SEQ ID NO: 67 through 132. In such cells, the nucleic acid may be under the control of the genomic regulatory elements, or may be under the control of exogenous regulatory elements including an exogenous promoter. By “exogenous” it is meant a promoter that is not normally coupled in vivo transcriptionally to the coding sequence for the kinase polypeptides.

[0152] The polypeptide is preferably a fragment of the protein encoded by an amino acid sequence selected from the group consisting of those set forth in SEQ ID NO: 67 through 132. By “fragment,” is meant an amino acid sequence present in a kinase polypeptide. Preferably, such a sequence comprises at least 32, 45, 50, 60, 100, 200, or 300 contiguous amino acids of a sequence selected from the group consisting of those set forth in SEQ ID NO: 67 through 132.

[0153] In another aspect, the invention features an isolated, enriched, or purified kinase polypeptide having the amino acid sequence selected from the group consisting of those set forth in SEQ ID NO: 67 through 132.

[0154] By “isolated” in reference to a polypeptide is meant a polymer of 6 (preferably 12, more preferably 18, or 21, most preferably 25, 32, 40, or 50) or more amino acids conjugated to each other, including polypeptides that are isolated from a natural source or that are synthesized. In certain aspects longer polypeptides are preferred, such as those comprising 100, 200, 300, 400, 450, 500, 550, 600, 700, 800, 900 or more contiguous amino acids, including an amino acid sequence selected from the group consisting of those set forth in SEQ ID NO: 67 through 132; other longer polypeptides also preferred are those having sequence that is substantially similar to a sequence selected from the group consisting of those set forth in SEQ ID NO: 67′ through SEQ ID NO: 132 (which preferably has at least 70%, 80%, 85%, 90%, 91%, 92%, 93%, 94%, 95%, 96%, 97%, 98%, 99% or 100% identity to the sequence).

[0155] The isolated polypeptides of the present invention are unique in the sense that they are not found in a pure or separated state in nature. Use of the term “isolated” indicates that a naturally occurring sequence has been removed from its normal cellular environment. Thus, the sequence may be in a cell-free solution or placed in a different cellular environment. The term does not imply that the sequence is the only amino acid chain present, but that it is essentially free (about 90-95% pure at least) of non-amino acid-based material naturally associated with it.

[0156] By the use of the term “enriched” in reference to a polypeptide is meant that the specific amino acid sequence constitutes a significantly higher fraction (2- to 5-fold) of the total amino acid sequences present in the cells or solution of interest than in normal or diseased cells or in the cells from which the sequence was taken. This could be caused by a person by preferential reduction in the amount of other amino acid sequences present, or by a preferential increase in the amount of the specific amino acid sequence of interest, or by a combination of the two. However, it should be noted that enriched does not imply that there are no other amino acid sequences present, just that the relative amount of the sequence of interest has been significantly increased. The term “significantly” here is used to indicate that the level of increase is useful to the person making such an increase, and generally means an increase relative to other amino acid sequences of about at least 2-fold, more preferably at least 5- to 10-fold or even more. The term also does not imply that there is no amino acid sequence from other sources. The other source of amino acid sequences may, for example, comprise amino acid sequence encoded by a yeast or bacterial genome, or a cloning vector such as pUC19. The term is meant to cover only those situations in which man has intervened to increase the proportion of the desired amino acid sequence.

[0157] It is also advantageous for some purposes that an amino acid sequence be in purified form. The term “purified” in reference to a polypeptide does not require absolute purity (such as a homogeneous preparation); instead, it represents an indication that the sequence is relatively purer than in the natural environment. Compared to the natural level this level should be at least 2-to 5-fold greater (e.g., in terms of mg/mL). Purification of at least one order of magnitude, preferably two or three orders, and more preferably four or five orders of magnitude is expressly contemplated. The substance is preferably free of contamination at a functionally significant level, for example 90%, 95%, or 99% pure.

[0158] In preferred embodiments, the kinase polypeptide is a fragment of the protein encoded by an amino acid sequence selected from the group consisting of those set forth in SEQ ID NO: 67 through 132. Preferably, the kinase polypeptide contains at least 32, 45, 50, 60, 100, 200, or 300 contiguous amino acids of a sequence selected from the group consisting of those set forth in SEQ ID NO: 3 and 4, or a functional derivative thereof.

[0159] In preferred embodiments, the kinase polypeptide comprises an amino acid sequence having (a) an amino acid sequence selected from the group consisting of those set forth in SEQ ID NO: 67 through 132; and (b) an amino acid sequence selected from the group consisting of those set forth in SEQ ID NO: 67 through 132, except that it lacks one or more of the domains selected from the group consisting of the catalytic domain, the C-terminal region, the N-terminal region, and the spacer region.

[0160] The polypeptide can be isolated from a natural source by methods well-known in the art. The natural source may be mammalian, preferably human, preferably blood, semen or tissue, and the polypeptide may be synthesized using an automated polypeptide synthesizer.

[0161] In some embodiments the invention includes a recombinant kinase polypeptide having (a) an amino acid sequence selected from the group consisting of those set forth in SEQ ID NO: 67 through 132. By “recombinant kinase polypeptide” is meant a polypeptide produced by recombinant DNA techniques such that it is distinct from a naturally occurring polypeptide either in its location (e.g., present in a different cell or tissue-than found in nature), purity or structure. Generally, such a recombinant polypeptide will be present in a cell in an amount different from that normally observed in nature.

[0162] The polypeptides to be expressed in host cells may also be fusion proteins which include regions from heterologous proteins. Such regions may be included to allow, e.g., secretion, improved stability, or facilitated purification of the polypeptide. For example, a sequence encoding an appropriate signal peptide can be incorporated into expression vectors. A DNA sequence for a signal peptide (secretory leader) may be fused in-frame to the polynucleotide sequence so that the polypeptide is translated as a fusion protein comprising the signal peptide. A signal peptide that is functional in the intended host cell promotes extracellular secretion of the polypeptide. Preferably, the signal sequence will be cleaved from the polypeptide upon secretion of the polypeptide from the cell. Thus, preferred fusion proteins can be produced in which the N-terminus of a kinase polypeptide is fused to a carrier peptide.

[0163] In one embodiment, the polypeptide comprises a fusion protein which includes a heterologous region used to facilitate purification of the polypeptide. Many of the available peptides used for such a function allow selective binding of the fusion protein to a binding partner. A preferred binding partner includes one or more of the IgG binding domains of protein A are easily purified to homogeneity by affinity chromatography on, for example, IgG-coupled Sepharose. Alternatively, many vectors have the advantage of carrying a stretch of histidine residues that can be expressed at the N-terminal or C-terminal end of the target protein, and thus the protein of interest can be recovered by metal chelation chromatography. A nucleotide sequence encoding a recognition site for a proteolytic enzyme such as enterokinase, factor X procollagenase or thrombine may immediately precede the sequence for a kinase polypeptide to permit cleavage of the fusion protein to obtain the mature kinase polypeptide. Additional examples of fusion-protein binding partners include, but are not limited to, the yeast I-factor, the honeybee melatin leader in sf9 insect cells, 6-His tag, thioredoxin tag, hemaglutinin tag, GST tag, and OmpA signal sequence tag. As will be understood by one of skill in the art, the binding partner which recognizes and binds to the peptide may be any ion, molecule or compound including metal ions (e.g., metal affinity columns), antibodies, or fragments thereof, and any protein or peptide which binds the peptide, such as the FLAG tag.

[0164] In another aspect, the invention features an antibody (e.g., a monoclonal or polyclonal antibody) having specific binding affinity to a kinase polypeptide or a kinase polypeptide domain or fragment where the polypeptide is selected from the group having a sequence at least about 90%, 91%, 92%, 93%, 94%, 95%, 96%, 97%, 98%, 99% or 100% identical to an amino acid sequence set forth in SEQ ID NO: 67 through 132. By “specific binding affinity” is meant that the antibody binds to the target kinase polypeptide with greater affinity than it binds to other polypeptides under specified conditions. Antibodies or antibody fragments are polypeptides that contain regions that can bind other polypeptides. Antibodies can be used to identify an endogenous source of kinase polypeptides, to monitor cell cycle regulation, and for immuno-localization of kinase polypeptides within the cell.

[0165] The term “polyclonal” refers to antibodies that are heterogenous populations of antibody molecules derived from the sera of animals immunized with an antigen or an antigenic functional derivative thereof. For the production of polyclonal antibodies, various host animals may be immunized by injection with the antigen. Various adjuvants may be used to increase the immunological response, depending on the host species.

[0166] “Monoclonal antibodies” are substantially homogenous populations of antibodies to a particular antigen. They may be obtained by any technique which provides for the production of antibody molecules by continuous cell lines in culture. Monoclonal antibodies may be obtained by methods known to those skilled in the art (Kohler et al., Nature 256: 495-497, 1975, and U.S. Pat. No. 4,376,110, both of which are hereby incorporated by reference herein in their entirety including any figures, tables, or drawings).

[0167] An antibody of the present invention includes “humanized” monoclonal and polyclonal antibodies. Humanized antibodies are recombinant proteins in which non-human (typically murine) complementarity determining regions of an antibody have been transferred from heavy and light variable chains of the non-human (e.g. murine) immunoglobulin into a human variable domain, followed by the replacement of some human residues in the framework regions of their murine counterparts. Humanized antibodies in accordance with this invention are suitable for use in therapeutic methods. General techniques for cloning murine immunoglobulin variable domains are described, for example, by the publication of Orlandi et al., Proc. Nat'l Acad. Sci. USA 86: 3833 (1989). Techniques for producing humanized monoclonal antibodies are described, for example, by Jones et al., Nature 321: 522 (1986), Riechmann et al., Nature 332: 323 (1988), Verhoeyen et al., Science 239: 1534 (1988), Carter et al., Proc. Nat'l Acad. Sci. USA 89: 4285 (1992), Sandhu, Crit. Rev. Biotech. 12: 437 (1992), and Singer et al., J. Immun. 150: 2844 (1993).

[0168] The term “antibody fragment” refers to a portion of an antibody, often the hypervariable region and portions of the surrounding heavy and light chains, that displays specific binding affinity for a particular molecule. A hypervariable region is a portion of an antibody that physically binds to the polypeptide target.

[0169] An antibody fragment of the present invention includes a “single-chain antibody,” a phrase used in this description to denote a linear polypeptide that binds antigen with specificity and that comprises variable or hypervariable regions from the heavy and light chains of an antibody. Such single chain antibodies can be produced by conventional methodology. The Vh and Vl regions of the Fv fragment can be covalently joined and stabilized by the insertion of a disulfide bond. See Glockshuber, et al., Biochemistry 1362 (1990). Alternatively, the Vh and Vl regions can be joined by the insertion of a peptide linker. A gene encoding the Vh, Vl and peptide linker sequences can be constructed and expressed using a recombinant expression vector. See Colcher, et al., J. Nat'l Cancer Inst. 82: 1191 (1990). Amino acid sequences comprising hypervariable regions from the Vh and VI antibody chains can also be constructed using disulfide bonds or peptide linkers.

[0170] Antibodies or antibody fragments having specific binding affinity to a polypeptide of the invention may be used in methods for detecting the presence and/or amount of kinase polypeptide in a sample by probing the sample with the antibody under conditions suitable for kinase antibody immunocomplex formation and detecting the presence and/or amount of the antibody conjugated to the kinase polypeptide. Diagnostic kits for performing such methods may be constructed to include antibodies or antibody fragments specific for the kinase as well as a conjugate of a binding partner of the antibodies or the antibodies themselves.

[0171] An antibody or antibody fragment with specific binding affinity to a kinase polypeptide of the invention can be isolated, enriched, or purified from a prokaryotic or eukaryotic organism. Routine methods known to those skilled in the art enable production of antibodies or antibody fragments, in both prokaryotic and eukaryotic organisms. Purification, enrichment, and isolation of antibodies, which are polypeptide molecules, are described above. The antibody may be directly labelled with a fluorescent or radioactive label.

[0172] Antibodies having specific binding affinity to a kinase polypeptide of the invention may be used in methods for detecting the presence and/or amount of kinase polypeptide in a sample by contacting the sample with the antibody under conditions such that an immunocomplex forms and detecting the presence and/or amount of the antibody conjugated to the kinase polypeptide. Diagnostic kits for performing such methods may be constructed to include a first container containing the antibody and a second container having a conjugate of a binding partner of the antibody and a label, such as, for example, a radioisotope or fluorescent label. The diagnostic kit may also include notification of an FDA approved use and instructions therefor. Antibodies may identify phosphorylated regions of a kinase polypeptide when a protein is phosphorylated.

[0173] In another aspect, the invention features a hybridoma which produces an antibody having specific binding affinity to a kinase polypeptide or a kinase polypeptide domain, where the polypeptide is selected from the group having an amino acid sequence set forth in SEQ ID NO: 67 through 132. By hybridoma is meant an immortalized cell line that is capable of secreting an antibody, for example an antibody to a kinase of the invention. In preferred embodiments, the antibody to the kinase comprises a sequence of amino acids that is able to specifically bind a kinase polypeptide of the invention.

[0174] In another aspect, the present invention is also directed to kits comprising antibodies that bind to a polypeptide encoded by any of the nucleic acid molecules described above, and a negative control antibody.

[0175] The term “negative control antibody” refers to an antibody derived from similar source as the antibody having specific binding affinity, but where it displays no binding affinity to a polypeptide of the invention.

[0176] In another aspect, the invention features a kinase polypeptide binding agent able to bind to a kinase polypeptide selected from the group having (a) an amino acid sequence selected from the group consisting of those set forth in SEQ ID NO: 67 through 132. The binding agent is preferably a purified antibody that recognizes an epitope present on a kinase polypeptide of the invention. Other binding agents include molecules that bind to kinase polypeptides and analogous molecules that bind to a kinase polypeptide. Such binding agents may be identified by using assays that measure kinase binding partner activity, such as those that measure PDGFR activity.

[0177] The invention also features a method for screening for human cells containing a kinase polypeptide of the invention or an equivalent sequence. The method involves identifying the novel polypeptide in human cells using techniques that are routine and standard in the art, such as those described herein for identifying the kinases of the invention (e.g., cloning, Southern or Northern blot analysis, in situ hybridization, PCR amplification, etc.).

[0178] In another aspect, the invention features methods for identifying a substance that modulates kinase activity comprising the steps of: (a) contacting a kinase polypeptide selected from the group having an amino acid sequence selected from the group consisting of those set forth in SEQ ID NO: 67 through 132 with a test substance; (b) measuring the activity of said polypeptide; and (c) determining whether said substance modulates the activity of said polypeptide. The skilled artisan will appreciate that the kinase polypeptides of the invention, including, for example, a portion of a full-length sequence such as a catalytic domain or a portion thereof, are useful for the identification of a substance which modulates kinase activity. Those kinase polypeptides having a functional activity (e.g., catalytic activity as defined herein) are useful for identifying a substance that modulates kinase activity.

[0179] The term “modulates” refers to the ability of a compound to alter the function of a kinase of the invention. A modulator preferably activates or inhibits the activity of a kinase of the invention depending on the concentration of the compound (modulator) exposed to the kinase.

[0180] The term “modulates” also refers to altering the function of kinases of the invention by increasing or decreasing the probability that a complex forms between the kinase and a natural binding partner. A modulator preferably increases the probability that such a complex forms between the kinase and the natural binding partner, more preferably increases or decreases the probability that a complex forms between the kinase and the natural binding partner depending on the concentration of the compound (modulator) exposed to the kinase, and most preferably decreases the probability that a complex forms between the kinase and the natural binding partner.

[0181] The term “activates” refers to increasing the cellular activity of the kinase. The term inhibit refers to decreasing the cellular activity of the kinase. Kinase activity is the phosphorylation of a substrate or the binding with a natural binding partner.

[0182] The term “complex” refers to an assembly of at least two molecules bound to one another. Signal transduction complexes often contain at least two protein molecules bound to one another. For instance, a tyrosine receptor protein kinase, GRB2, SOS, RAF, and RAS assemble to form a signal transduction complex in response to a mitogenic ligand.

[0183] The term “natural binding partner” refers to polypeptides, lipids, small molecules, or nucleic acids that bind to kinases in cells. A change in the interaction between a kinase and a natural binding partner can manifest itself as an increased or decreased probability that the interaction forms, or an increased or decreased concentration of kinase/natural binding partner complex.

[0184] The term “contacting” as used herein refers to mixing a solution comprising the test compound with a liquid medium bathing the cells of the methods. The solution comprising the compound may also comprise another component, such as dimethyl sulfoxide (DMSO), which facilitates the uptake of the test compound or compounds into the cells of the methods. The solution comprising the test compound may be added to the medium bathing the cells by utilizing a delivery apparatus, such as a pipette-based device or syringe-based device.

[0185] In another aspect, the invention features methods for identifying a substance that modulates kinase activity in a cell comprising the steps of: (a) expressing a kinase polypeptide in a cell, wherein said polypeptide is selected from the group having an amino acid sequence selected from the group consisting of those set forth in SEQ ID NO: 67 through 132; (b) adding a test substance to said cell; and (c) monitoring a change in kinase activity or a change in cell phenotype or the interaction between said polypeptide and a natural binding partner. The skilled artisan will appreciate that the kinase polypeptides of the invention, including, for example, a portion of a full-length sequence such as a catalytic domain or a portion thereof, and are useful for the identification of a substance which modulates kinase activity. Those kinase polypeptides having a functional activity (e.g., catalytic activity as defined herein) are useful for identifying a substance that modulates kinase activity.

[0186] The term “expressing” as used herein refers to the production of kinases of the invention from a nucleic acid vector containing kinase genes within a cell. The nucleic acid vector is transfected into cells using well known techniques in the art as described herein.

[0187] Another aspect of the instant invention is directed to methods of identifying compounds that bind to kinase polypeptides of the present invention, comprising contacting the kinase polypeptides with a compound, and determining whether the compound binds the kinase polypeptides. Binding can be determined by binding assays which are well known to the skilled artisan, including, but not limited to, gel-shift assays, Western blots, radiolabeled competition assay, phage-based expression cloning, co-fractionation by chromatography, co-precipitation, cross linking, interaction trap/two-hybrid analysis, southwestern analysis, ELISA, and the like, which are described in, for example, Current Protocols in Molecular Biology, 1999, John Wiley & Sons, NY, which is incorporated herein by reference in its entirety. The compounds to be screened include, but are not limited to, compounds of extracellular, intracellular, biological or chemical origin.

[0188] The methods of the invention also embrace compounds that are attached to a label, such as a radiolabel (e.g., ¹²⁵I, ³⁵S, ³²P, ³³P, ³H), a fluorescence label, a chemiluminescent label, an enzymic label and an immunogenic label. The kinase polypeptides employed in such a test may either be free in solution, attached to a solid support, borne on a cell surface, located intracellularly or associated with a portion of a cell. One skilled in the art can, for example, measure the formation of complexes between a kinase polypeptide and the compound being tested. Alternatively, one skilled in the art can examine the diminution in complex formation between a kinase polypeptide and its substrate caused by the compound being tested.

[0189] Other assays can be used to examine enzymatic activity including, but not limited to, photometric, radiometric, HPLC, electrochemical, and the like, which are described in, for example, Enzyme Assays: A Practical Approach, eds. R. Eisenthal and M. J. Danson, 1992, Oxford University Press, which is incorporated herein by reference in its entirety.

[0190] Another aspect of the present invention is directed to methods of identifying compounds which modulate (i.e., increase or decrease) activity of a kinase polypeptide comprising contacting the kinase polypeptide with a compound, and determining whether the compound modifies activity of the kinase polypeptide. As described herein, the kinase polypeptides of the invention include a portion of a full-length sequence, such as a catalytic domain, as defined herein. In some instances, the kinase polypeptides of the invention comprise less than the entire catalytic domain, yet exhibit kinase or kinase-like activity. These compounds are also referred to as “modulators of protein kinases.” The activity in the presence of the test compound is compared to the activity in the absence of the test compound. Where the activity of a sample containing the test compound is higher than the activity in a sample lacking the test compound, the compound will have increased the activity. Similarly, where the activity of a sample containing the test compound is lower than the activity in the sample lacking the test compound, the compound will have inhibited the activity.

[0191] The present invention is particularly useful for screening compounds by using a kinase polypeptide in any of a variety of drug screening techniques. The compounds to be screened include, but are not limited to, extracellular, intracellular, biological or chemical origin. The kinase polypeptide employed in such a test may be in any form, preferably, free in solution, attached to a solid support, borne on a cell surface or located intracellularly. One skilled in the art can, for example, measure the formation of complexes between a kinase polypeptide and the compound being tested. Alternatively, one skilled in the art can examine the diminution in complex formation between a kinase polypeptide and its substrate caused by the compound being tested.

[0192] The activity of kinase polypeptides of the invention can be determined by, for example, examining the ability to bind or be activated by chemically synthesised peptide ligands. Alternatively, the activity of the kinase polypeptides can be assayed by examining their ability to bind metal ions such as calcium, hormones, chemokines, neuropeptides, neurotransmitters, nucleotides, lipids, and odorants. Thus, modulators of the kinase polypeptide's activity may alter a kinase function, such as a binding property of a kinase or an activity such as signal transduction or membrane localization.

[0193] In various embodiments of the method, the assay may take the form of a yeast growth assay, an Aequorin assay, a Luciferase assay, a mitogenesis assay, a MAP Kinase activity assay, as well as other binding or function-based assays of kinase activity that are generally known in the art. In several of these embodiments, the invention includes any of the receptor and non-receptor protein tyrosine kinases, receptor and non-receptor protein phosphatases, polypeptides containing SRC homology 2 and 3 domains, phosphotyrosine binding proteins (SRC homology 2 (SH2) and phosphotyrosine binding (PTB and PH) domain containing proteins), proline-rich binding proteins (SH3 domain containing proteins), GTPases, phosphodiesterases, phospholipases, prolyl isomerases, proteases, Ca2+ binding proteins, cAMP binding proteins, guanyl cyclases, adenylyl cyclases, NO generating proteins, nucleotide exchange factors, and transcription factors. Biological activities of kinases according to the invention include, but are not limited to, the binding of a natural or a synthetic ligand, as well as any one of the functional activities of kinases known in the art. Non-limiting examples of kinase activities include transmembrane signaling of various forms, which may involve kinase binding interactions and/or the exertion of an influence over signal transduction.

[0194] The modulators of the invention exhibit a variety of chemical structures, which can be generally grouped into mimetics of natural kinase ligands, and peptide and non-peptide allosteric effectors of kinases. The invention does not restrict the sources for suitable modulators, which may be obtained from natural sources such as plant, animal or mineral extracts, or non-natural sources such as small molecule libraries, including the products of combinatorial chemical approaches to library construction, and peptide libraries.

[0195] The use of cDNAs encoding kinases in drug discovery programs is well-known; assays capable of testing thousands of unknown compounds per day in high-throughput screens (HTSs) are thoroughly documented. The literature is replete with examples of the use of radiolabelled ligands in HTS binding assays for drug discovery (see Williams, Medicinal Research Reviews, 1991, 11, 147-184; Sweetnam, et al., J. Natural Products, 1993, 56, 441-455 for review). Recombinant proteins are preferred for binding assay HTS because they allow for better specificity (higher relative purity), provide the ability to generate large amounts of material, and can be used in a broad variety of formats (see Hodgson, Bio/Technology, 1992, 10, 973-980; each of which is incorporated herein by reference in its entirety).

[0196] A variety of heterologous systems is available for functional expression of recombinant proteins that are well known to those skilled in the art. Such systems include bacteria (Strosberg, et al., Trends in Pharmacological Sciences, 1992, 13, 95-98), yeast (Pausch, Trends in Biotechnology, 1997, 15, 487-494), several kinds of insect cells (Vanden Broeck, Int. Rev. Cytology, 1996, 164, 189-268), amphibian cells (Jayawickreme et al., Current Opinion in Biotechnology, 1997, 8, 629-634) and several mammalian cell lines (CHO, HEK293, COS, etc.; see Gerhardt, et al., Eur. J. Pharmacology, 1997, 334, 1-23). These examples do not preclude the use of other possible cell expression systems, including cell lines obtained from nematodes (PCT application WO 98/37177).

[0197] An expressed kinase can be used for HTS binding assays in conjunction with its defined ligand, in this case the corresponding peptide that activates it. The identified peptide is labeled with a suitable radioisotope, including, but not limited to, ¹²⁵I, ³H, ³⁵S or ³²P, by methods that are well known to those skilled in the art. Alternatively, the peptides may be labeled by well-known methods with a suitable fluorescent derivative (Baindur, et al., Drug Dev. Res., 1994, 33, 373-398; Rogers, Drug Discovery Today, 1997, 2, 156-160). Radioactive ligand specifically bound to the receptor in membrane preparations made from the cell line expressing the recombinant protein can be detected in HTS assays in one of several standard ways, including filtration of the receptor-ligand complex to separate bound ligand from unbound ligand (Williams, Med. Res. Rev., 1991, 11, 147-184; Sweetnam, et al., J. Natural Products, 1993, 56, 441-455). Alternative methods include a scintillation proximity assay (SPA) or a FlashPlate format in which such separation is unnecessary (Nakayama, Cur. Opinion Drug Disc. Dev., 1998, 1, 85-91 Bossé, et al., J. Biomolecular Screening, 1998, 3, 285-292.). Binding of fluorescent ligands can be detected in various ways, including fluorescence energy transfer (FRET), direct spectrophotofluorometric analysis of bound ligand, or fluorescence polarization (Rogers, Drug Discovery Today, 1997, 2, 156-160; Hill, Cur. Opinion Drug Disc. Dev., 1998, 1, 92-97).

[0198] The kinases and natural binding partners required for functional expression of heterologous kinase polypeptides can be native constituents of the host cell or can be introduced through well-known recombinant technology. The kinase polypeptides can be intact or chimeric. The kinase activation results in the stimulation or inhibition of other native proteins, events that can be linked to a measurable response.

[0199] Examples of such biological responses include, but are not limited to, the following: the ability to survive in the absence of a limiting nutrient in specifically engineered yeast cells (Pausch, Trends in Biotechnology, 1997, 15, 487-494); changes in intracellular Ca²⁺ concentration as measured by fluorescent dyes (Murphy, et al., Cur. Opinion Drug Disc. Dev., 1998, 1, 192-199), cell cycle, apoptosis, and growth. Fluorescence changes can also be used to monitor ligand-induced changes in membrane potential or intracellular pH; an automated system suitable for HTS has been described for these purposes (Schroeder, et al., J. Biomolecular Screening, 1996, 1, 75-80).

[0200] The invention contemplates a multitude of assays to screen and identify inhibitors of ligand binding to kinase polypeptides. In one example, the kinase polypeptide is immobilized and interaction with a binding partner is assessed in the presence and absence of a candidate modulator such as an inhibitor compound. In another example, interaction between the kinase polypeptide and its binding partner is assessed in a solution assay, both in the presence and absence of a candidate inhibitor compound. In either assay, an inhibitor is identified as a compound that decreases binding between the kinase polypeptide and its natural binding partner. Another contemplated assay involves a variation of the di-hybrid assay wherein an inhibitor of protein/protein interactions is identified by detection of a positive signal in a transformed or transfected host cell, as described in PCT publication number WO 95/20652, published Aug. 3, 1995 and is included by reference herein including any figures, tables, or drawings.

[0201] Candidate modulators contemplated by the invention include compounds selected from libraries of either potential activators or potential inhibitors. There are a number of different libraries used for the identification of small molecule modulators, including: (1) chemical libraries, (2) natural product libraries, and (3) combinatorial libraries comprised of random peptides, oligonucleotides or organic molecules. Chemical libraries consist of random chemical structures, some of which are analogs of known compounds or analogs of compounds that have been identified as “hits” or “leads” in other drug discovery screens, while others are derived from natural products, and still others arise from non-directed synthetic organic chemistry. Natural product libraries are collections of microorganisms, animals, plants, or marine organisms which are used to create mixtures for screening by: (1) fermentation and extraction of broths from soil, plant or marine microorganisms or (2) extraction of plants or marine organisms. Natural product libraries include polyketides, non-ribosomal peptides, and variants (non-naturally occurring) thereof. For a review, see Science 282: 63-68 (1998). Combinatorial libraries are composed of large numbers of peptides, oligonucleotides, or organic compounds as a mixture. These libraries are relatively easy to prepare by traditional automated synthesis methods, PCR, cloning, or proprietary synthetic methods. Of particular interest are non-peptide combinatorial libraries. Still other libraries of interest include peptide, protein, peptidomimetic, multiparallel synthetic collection, recombinatorial, and polypeptide libraries. For a review of combinatorial chemistry and libraries created therefrom, see Myers, Curr. Opin. Biotechnol. 8: 701-707 (1997). Identification of modulators through use of the various libraries described herein permits modification of the candidate “hit” (or “lead”) to optimize the capacity of the “hit” to modulate activity.

[0202] Still other candidate inhibitors-contemplated by the invention can be designed and include soluble forms of binding partners, as well as such binding partners as chimeric, or fusion, proteins. A “binding partner” as used herein broadly encompasses both natural binding partners as described above as well as chimeric polypeptides, peptide modulators other than natural ligands, antibodies, antibody fragments, and modified compounds comprising antibody domains that are immunospecific for the expression product of the identified kinase gene.

[0203] Other assays may be used to identify specific peptide ligands of a kinase polypeptide, including assays that identify ligands of the target protein through measuring direct binding of test ligands to the target protein, as well as assays that identify ligands of target proteins through affinity ultrafiltration with ion spray mass spectroscopy/HPLC methods or other physical and analytical methods. Alternatively, such binding interactions are evaluated indirectly using the yeast two-hybrid system described in Fields et al., Nature, 340: 245-246 (1989), and Fields et al., Trends in Genetics, 10: 286-292 (1994), both of which are incorporated herein by reference. The two-hybrid system is a genetic assay for detecting interactions between two proteins or polypeptides. It can be used to identify proteins that bind to a known protein of interest, or to delineate domains or residues critical for an interaction. Variations on this methodology have been developed to clone genes that encode DNA binding proteins, to identify peptides that bind to a protein, and to screen for drugs. The two-hybrid system exploits the ability of a pair of interacting proteins to bring a transcription activation domain into close proximity with a DNA binding domain that binds to an upstream activation sequence (LAS) of a reporter gene, and is generally performed in yeast. The assay requires the construction of two hybrid genes encoding (1) a DNA-binding domain that is fused to a first protein and (2) an activation domain fused to a second protein. The DNA-binding domain targets the first hybrid protein to the UAS of the reporter gene; however, because most proteins lack an activation domain, this DNA-binding hybrid protein does not activate transcription of the reporter gene. The second hybrid protein, which contains the activation domain, cannot by itself activate expression of the reporter gene because it does not bind the UAS. However, when both hybrid proteins are present, the noncovalent interaction of the first and second proteins tethers the activation domain to the UAS, activating transcription of the reporter gene. For example, when the first protein is a kinase gene product, or fragment thereof, that is known to interact with another protein or nucleic acid, this assay can be used to detect agents that interfere with the binding interaction. Expression of the reporter gene is monitored as different test agents are added to the system. The presence of an inhibitory agent results in lack of a reporter signal.

[0204] When the function of the kinase polypeptide gene product is unknown and no ligands are known to bind the gene product, the yeast two-hybrid assay can also be used to identify proteins that bind to the gene product. In an assay to identify proteins that bind to a kinase polypeptide, or fragment thereof, a fusion polynucleotide encoding both a kinase polypeptide (or fragment) and a UAS binding domain (i.e., a first protein) may be used. In addition, a large number of hybrid genes each encoding a different second protein fused to an activation domain are produced and screened in the assay. Typically, the second protein is encoded by one or more members of a total cDNA or genomic DNA fusion library, with each second protein coding region being fused to the activation domain. This system is applicable to a wide variety of proteins, and it is not even necessary to know the identity or function of the second binding protein. The system is highly sensitive and can detect interactions not revealed by other methods; even transient interactions may trigger transcription to produce a stable mRNA that can be repeatedly translated to yield the reporter protein.

[0205] Other assays may be used to search for agents that bind to the target protein. One such screening method to identify direct binding of test ligands to a target protein is described in U.S. Pat. No. 5,585,277, incorporated herein by reference. This method relies on the principle that proteins generally exist as a mixture of folded and unfolded states, and continually alternate between the two states. When a test ligand binds to the folded form of a target protein (i.e., when the test ligand is a ligand of the target protein), the target protein molecule bound by the ligand remains in its folded state. Thus, the folded target protein is present to a greater extent in the presence of a test ligand which binds the target protein, than in the absence of a ligand. Binding of the ligand to the target protein can be determined by any method which distinguishes between the folded and unfolded states of the target protein. The function of the target protein need not be known in order for this assay to be performed. Virtually any agent can be assessed by this method as a test ligand, including, but not limited to, metals, polypeptides, proteins, lipids, polysaccharides, polynucleotides and small organic molecules.

[0206] Another method for identifying ligands of a target protein is described in Wieboldt et al., Anal. Chem., 69: 1683-1691 (1997), incorporated herein by reference. This technique screens combinatorial libraries of 20-30 agents at a time in solution phase for binding to the target protein. Agents that bind to the target protein are separated from other library components by simple membrane washing. The specifically selected molecules that are retained on the filter are subsequently liberated from the target protein and analyzed by HPLC and pneumatically assisted electrospray (ion spray) ionization mass spectroscopy. This procedure selects library components with the greatest affinity for the target protein, and is particularly useful for small molecule libraries.

[0207] In preferred embodiments of the invention, methods of screening for compounds which modulate kinase activity comprise contacting test compounds with kinase polypeptides and assaying for the presence of a complex between the compound and the kinase polypeptide. In such assays, the ligand is typically labelled. After suitable incubation, free ligand is separated from that present in bound form, and the amount of free or uncomplexed label is a measure of the ability of the particular compound to bind to the kinase polypeptide.

[0208] In another embodiment of the invention, high throughput screening for compounds having suitable binding affinity to kinase polypeptides is employed. Briefly, large numbers of different small peptide test compounds are synthesised on a solid substrate. The peptide test compounds are contacted with the kinase polypeptide and washed. Bound kinase polypeptide is then detected by methods well known in the art. Purified polypeptides of the invention can also be coated directly onto plates for use in the aforementioned drug screening techniques. In addition, non-neutralizing antibodies can be used to capture the protein and immobilize it on the solid support.

[0209] Other embodiments of the invention comprise using competitive screening assays in which neutralizing antibodies capable of binding a polypeptide of the invention specifically compete with a test compound for binding to the polypeptide. In this manner, the antibodies can be used to detect the presence of any peptide that shares one or more antigenic determinants with a kinase polypeptide. Radiolabeled competitive binding studies are described in A. H. Lin et al. Antimicrobial Agents and Chemotherapy, 1997, vol. 41, no. 10. pp. 2127-2131, the disclosure of which is incorporated herein by reference in its entirety.

[0210] In another aspect, the invention provides methods for treating a disease by administering to a patient in need of such treatment a substance that modulates the activity of a kinase polypeptide selected from the group consisting of those set forth in SEQ ID NO: 67 through 132, as well as the full-length polypeptide thereof, or a portion of any of these sequences that retains functional activity, as described herein. Preferably the disease is selected from the group consisting of cancers, immune-elated diseases and disorders, cardiovascular disease, brain or neuronal-associated diseases, and metabolic disorders. More specifically these diseases include cancer of tissues, blood, or hematopoietic origin, particularly those involving breast, colon, lung, prostate, cervical, brain, ovarian, bladder, skin or kidney; central or peripheral nervous system diseases and conditions including migraine, pain, sexual dysfunction, mood disorders, attention disorders, cognition disorders, hypotension, and hypertension; psychotic and neurological disorders, including anxiety, schizophrenia, manic depression, delirium, dementia, severe mental retardation and dyskinesias, such as Huntington's disease or Tourette's Syndrome; neurodegenerative diseases including Alzheimer's, Parkinson's, Multiple sclerosis, and Amyotrophic lateral sclerosis; viral or non-viral infections caused by HIV-1, HIV-2 or other viral- or prion-agents or fungal- or bacterial-organisms; metabolic disorders including Diabetes and obesity and their related syndromes, among others; cardiovascular disorders including reperfusion restenosis, hypertension, coronary thrombosis, clotting disorders, unregulated cell growth disorders, atherosclerosis; ocular disease including glaucoma, retinopathy, and macular degeneration; inflammatory disorders including rheumatoid arthritis, chronic inflammatory bowel disease, chronic inflammatory pelvic disease, multiple sclerosis, asthma, osteoarthritis, bone disorders, psoriasis, atherosclerosis, rhinitis, autoimmunity, and organ transplant rejection.

[0211] In preferred embodiments, the invention provides methods for treating or preventing a disease or disorder by administering to a patient in need of such treatment a substance that modulates the activity of a kinase polypeptide having an amino acid sequence selected from the group consisting of those set forth in SEQ ID NO: 67 through 132, as well as the full-length polypeptide thereof, or a portion of any of these sequences that retains functional activity, as described herein. Preferably, the disease is selected from the group consisting of cancers, immune-related diseases and disorders, cardiovascular disease, brain or neuronal-associated diseases, and metabolic disorders. More specifically these diseases include cancer of tissues, blood, or hematopoietic origin, particularly those involving breast, colon, lung, prostate, cervical, brain, ovarian, bladder, or kidney; central or peripheral nervous system diseases and conditions including migraine, pain, sexual dysfunction, mood disorders, attention disorders, cognition disorders, hypotension, and hypertension; psychotic and neurological disorders, including anxiety, schizophrenia, manic depression, delirium, dementia, severe mental retardation and dyskinesias, such as Huntington's disease or Tourette's Syndrome; neurodegenerative diseases including Alzheimer's, Parkinson's, Multiple sclerosis, and Amyotrophic lateral sclerosis; viral or non-viral infections caused by HIV-1, HIV-2 or other viral- or prion-agents or fungal- or bacterial-organisms; metabolic disorders including Diabetes and obesity and their related syndromes, among others; cardiovascular disorders including reperfusion restenosis, coronary thrombosis, clotting disorders, unregulated cell growth disorders, atherosclerosis; ocular disease including glaucoma, retinopathy, and macular degeneration; inflammatory disorders including rheumatoid arthritis, chronic inflammatory bowel disease, chronic inflammatory pelvic disease, multiple sclerosis, asthma, osteoarthritis, psoriasis, atherosclerosis, rhinitis, autoimmunity, and organ transplant rejection.

[0212] Substances useful for treatment of kinase-related disorders or diseases preferably show positive results in one or more in vitro assays for an activity corresponding to treatment of the disease or disorder in question (Examples of such assays are provided in the references in section VI, below; and in Example 7, herein). Examples of substances that can be screened for favorable activity are provided and referenced in section VI, below. The substances that modulate the activity of the kinases preferably include, but are not limited to, antisense oligonucleotides and inhibitors of protein kinases, as determined by methods and screens referenced in section VI and Example 7, below.

[0213] The term “preventing” refers to decreasing the probability that an organism contracts or develops an abnormal condition.

[0214] The term “treating” refers to having a therapeutic effect and at least partially alleviating or abrogating an abnormal condition in the organism.

[0215] The term “therapeutic effect” refers to the inhibition or activation factors causing or contributing to the abnormal condition. A therapeutic effect relieves to some extent one or more of the symptoms of the abnormal condition. In reference to the treatment of abnormal conditions, a therapeutic effect can refer to one or more of the following: (a) an decrease in the proliferation, growth, and/or differentiation of cells; (b) inhibition (i.e., slowing or stopping) of cell death; (c) inhibition of degeneration; (d) relieving to some extent one or more of the symptoms associated with the abnormal condition; and (e) enhancing the function of the affected population of cells. Compounds demonstrating efficacy against abnormal conditions can be identified as described herein.

[0216] The term “abnormal condition” refers to a function in the cells or tissues of an organism that deviates from their normal functions in that organism. An abnormal condition can relate to cell proliferation, cell differentiation, or cell survival.

[0217] Abnormal cell proliferative conditions include cancers such as fibrotic and mesangial disorders, abnormal angiogenesis and vasculogenesis, wound healing, psoriasis, diabetes mellitus, and inflammation.

[0218] Abnormal differentiation conditions include, but are not limited to neurodegenerative disorders, slow wound healing rates, and slow tissue grafting healing rates.

[0219] Abnormal cell survival conditions relate to conditions in which programmed cell death (apoptosis) pathways are activated or abrogated. A number of protein kinases are associated with the apoptosis pathways. Aberrations in the function of any one of the protein kinases could lead to cell immortality or premature cell death.

[0220] The term “aberration,” in conjunction with the function of a kinase in a signal transduction process, refers to a kinase that is over- or under-expressed in an organism, mutated such that its catalytic activity is lower or higher than wild-type protein kinase activity, mutated such that it can no longer interact with a natural binding partner, is no longer modified by another protein kinase or protein phosphatase, or no longer interacts with a natural binding partner.

[0221] The term “administering” relates to a method of incorporating a compound into cells or tissues of an organism. The abnormal condition can be prevented or treated when the cells or tissues of the organism exist within the organism or outside of the organism. Cells existing outside the organism can be maintained or grown in cell culture dishes. For cells harbored within the organism, many techniques exist in the art to administer compounds, including (but not limited to) oral, parenteral, dermal, injection, and aerosol applications. For cells outside of the organism, multiple techniques exist in the art to administer the compounds, including (but not limited to) cell microinjection techniques, transformation techniques, and carrier techniques.

[0222] The abnormal condition can also be prevented or treated by administering a compound to a group of cells having an aberration in a signal transduction pathway to an organism. The effect of administering a compound on organism function can then be monitored. The organism is preferably a mammal. The organism also is preferably a mouse, rat, rabbit, guinea pig, dog, cat, horse, pig, sheep, or goat, more preferably a monkey or ape, and most preferably a human.

[0223] In another aspect, the invention features methods for detection of a kinase polypeptide in a sample as a diagnostic tool for diseases or disorders, wherein the method comprises the steps of: (a) contacting the sample with a nucleic acid probe which hybridizes under hybridization assay conditions to a nucleic acid target region of a kinase polypeptide having an amino acid sequence selected from the group consisting of those set forth in SEQ ID NO: 67 through 132, said probe comprising the nucleic acid sequence encoding the polypeptide, fragments thereof, and the complements of the sequences and fragments; and (b) detecting the presence or amount of the probe: target region hybrid as an indication of the disease.

[0224] In preferred embodiments of the invention, the disease or disorder is selected from the group consisting of Preferably the disease is selected from the group consisting of cancers, immune-elated diseases and disorders, cardiovascular disease, brain or neuronal-associated diseases, and metabolic disorders. More specifically these diseases include cancer of tissues, blood, or hematopoietic origin, particularly those involving breast, colon, lung, prostate, cervical, brain, ovarian, bladder, skin or kidney; central or peripheral nervous system diseases and conditions including migraine, pain, sexual dysfunction, mood disorders, attention disorders, cognition disorders, hypotension, and hypertension; psychotic and neurological disorders, including anxiety, schizophrenia, manic depression, delirium, dementia, severe mental retardation and dyskinesias, such as Huntington's disease or Tourette's Syndrome; neurodegenerative diseases including Alzheimer's, Parkinson's, Multiple sclerosis, and Amyotrophic lateral sclerosis; viral or non-viral infections caused by HIV-1, HIV-2 or other viral- or prion-agents or fungal- or bacterial-organisms; metabolic disorders including Diabetes and obesity and their related syndromes, among others; cardiovascular disorders including reperfusion restenosis, hypertension, coronary thrombosis, clotting disorders, unregulated cell growth disorders, atherosclerosis; ocular disease including glaucoma, retinopathy, and macular degeneration; inflammatory disorders including rheumatoid arthritis, chronic inflammatory bowel disease, chronic inflammatory pelvic disease, multiple sclerosis, asthma, osteoarthritis, bone disorders, psoriasis, atherosclerosis, rhinitis, autoimmunity, and organ transplant rejection.

[0225] The kinase “target region” is the nucleotide base sequence selected from the group consisting of those set forth in SEQ ID NO: 1 through SEQ ID NO: 66, or the corresponding full-length sequences, a functional derivative thereof, or a fragment thereof, to which the nucleic acid probe will specifically hybridize. Specific hybridization indicates that in the presence of other nucleic acids the probe only hybridizes detectably with the kinase of the invention's target region. Putative target regions can be identified by methods well known in the art consisting of alignment and comparison of the most closely related sequences in the database.

[0226] In preferred embodiments the nucleic acid probe hybridizes to a kinase target region encoding at least 6, 12, 75, 90, 105, 120, 150, 200, 250, 300 or 350 contiguous amino acids of a sequence selected from the group consisting of those set forth in SEQ ID NO: 67 through 132, or the corresponding full-length amino acid sequence, a portion of any of these sequences that retains functional activity, as described herein, or a functional derivative thereof. Hybridization conditions should be such that hybridization occurs only with the kinase genes in the presence of other nucleic acid molecules. Under stringent hybridization conditions only highly complementary nucleic acid sequences hybridize. Preferably, such conditions prevent hybridization of nucleic acids having more than 1 or 2 mismatches out of 20 contiguous nucleotides. Such conditions are defined supra.

[0227] The diseases for which detection of kinase genes in a sample could be diagnostic include diseases in which kinase nucleic acid (DNA and/or RNA) is amplified in comparison to normal cells. By “amplification” is meant increased numbers of kinase DNA or RNA in a cell compared with normal cells. In normal cells, kinases are typically found as single copy genes. In selected diseases, the chromosomal location of the kinase genes may be amplified, resulting in multiple copies of the gene, or amplification. Gene amplification can lead to amplification of kinase RNA, or kinase RNA can be amplified in the absence of kinase DNA amplification.

[0228] “Amplification” as it refers to RNA can be the detectable presence of kinase RNA in cells, since in some normal cells there is no basal expression of kinase RNA. In other normal cells, a basal level of expression of kinase exists, therefore in these cases amplification is the detection of at least 1-2-fold, and preferably more, kinase RNA, compared to the basal level.

[0229] The diseases that could be diagnosed by detection of kinase nucleic acid in a sample preferably include cancers or other diseases described herein. The test samples suitable for nucleic acid probing methods of the present invention include, for example, cells or nucleic acid extracts of cells, or biological fluids. The samples used in the above-described methods will vary based on the assay format, the detection method and the nature of the tissues, cells or extracts to be assayed. Methods for preparing nucleic acid extracts of cells are well known in the art and can be readily adapted in order to obtain a sample that is compatible with the method utilized.

[0230] The invention also features a method for detection of a kinase polypeptide in a sample as a diagnostic tool for a disease or disorder, wherein the method comprises: (a) comparing a nucleic acid target region encoding the kinase polypeptide in a sample, where the kinase polypeptide has an amino acid sequence selected from the group consisting those set forth in SEQ ID NO: 67 through SEQ ID NO: 132, or one or more fragments thereof, with a control nucleic acid target region encoding the kinase polypeptide, or one or more fragments thereof; and (b) detecting differences in sequence or amount between the target region and the control target region, as an indication of the disease or disorder. Preferably the disease is selected from the group consisting of cancers, immune-related diseases and disorders, cardiovascular disease, brain or neuronal-associated diseases, and metabolic disorders. More specifically these diseases include cancer of tissues, blood, or hematopoietic origin, particularly those involving breast, colon, lung, prostate, cervical, brain, ovarian, bladder, or kidney; central or peripheral nervous system diseases and conditions including migraine, pain, sexual dysfunction, mood disorders, attention disorders, cognition disorders, hypotension, and hypertension; psychotic and neurological disorders, including anxiety, schizophrenia, manic depression, delirium, dementia, severe mental retardation and dyskinesias, such as Huntington's disease or Tourette's Syndrome; neurodegenerative diseases including Alzheimer's, Parkinson's, Multiple sclerosis, and Amyotrophic lateral sclerosis; viral or non-viral infections caused by HIV-1, HIV-2 or other viral- or prion-agents or fungal- or bacterial-organisms; metabolic disorders including Diabetes and obesity and their related syndromes, among others; cardiovascular disorders including reperfusion restenosis, coronary thrombosis, clotting disorders, unregulated cell growth disorders, atherosclerosis; ocular disease including glaucoma, retinopathy, and macular degeneration; inflammatory disorders including rheumatoid arthritis, chronic inflammatory bowel disease, chronic inflammatory pelvic disease, multiple sclerosis, asthma, osteoarthritis, psoriasis, atherosclerosis, rhinitis, autoimmunity, and organ transplant rejection.

[0231] The term “comparing” as used herein refers to identifying discrepancies between the nucleic acid target region isolated from a sample, and the control nucleic acid target region. The discrepancies can be in the nucleotide sequences, e.g. insertions, deletions, or point mutations, or in the amount of a given nucleotide sequence. Methods to determine these discrepancies in sequences are well-known to one of ordinary skill in the art. The “control” nucleic acid target region refers to the sequence or amount of the sequence found in normal cells, e.g. cells that are not diseased as discussed previously.

[0232] The summary of the invention described above is not limiting and other features and advantages of the invention will be apparent from the following detailed description of the invention, and from the claims.

### BRIEF DESCRIPTION OF THE FIGURES

[0233] FIG. 1 shows the nucleotide sequences for human protein kinases oriented in a 5′ to 3′ direction (SEQ ID NO: 1-66).

[0234] FIG. 2 shows the amino acid sequences for the human protein kinases encoded by SEQ ID No. 1 and 2 in the direction of translation (SEQ ID NO: 67 through 132). If a predicted stop codons is within the coding region, it is indicated by an ‘x.’

### DETAILED DESCRIPTION OF THE INVENTION

[0235] The invention provides, inter alia, protein kinase and kinase-like genes, as well as fragments thereof, which have been identified in genomic databases. In part, the invention provides nucleic acid molecules that are capable of encoding polypeptides having a kinase or kinase-like activity. By reference to Tables 1 though 6, below, genes of the invention can be better understood. The invention additionally provides a number of different embodiments, such as those described below.

[0236] Nucleic Acids

[0237] Associations of chromosomal localizations for mapped genes with amplicons implicated in cancer are based on literature searches (PubMed http://www.ncbi.nlm.nih.gov/entrez/query.fcgi), OMIM searches (Online Mendelian Inheritance in Man, http://www.ncbi.nlm.nih.gov/Omim/searchomim.html) and the comprehensive database of cancer amplicons maintained by Knuutila, et al. (Knuutila, et al., DNA copy number amplifications in human neoplasms. Review of comparative genomic hybridization studies. Am J Pathol 152: 1107-1123, 1998. http://www.helsinki.fi/˜lgl_www/CMG.html).

[0238] For single nucleotide polymorphisms, an accession number is given if the SNP is documented in dbSNP (the database of single nucleotide polymorphisms) maintained at NCBI (http://www.ncbi.nlm.nih.gov/SNP/index.html). The accession number for SNP can be used to retrieve the full SNP-containing sequence from this site.

[0239] All of the sequences are derived from human DNA, with the exception of Pak4, which is from Mus musculus.

### Nucleic Acid Probes, Methods, and Kits for Detection of Kinases

[0240] The invention additionally provides nucleic acid probes and uses therefor. A nucleic acid probe of the present invention may be used to probe an appropriate chromosomal or cDNA library by usual hybridization methods to obtain other nucleic acid molecules of the present invention. A chromosomal DNA or cDNA library may be prepared from appropriate cells according to recognized methods in the art (cf. “Molecular Cloning: A Laboratory Manual,” second edition, Cold Spring Harbor Laboratory, Sambrook, Fritsch, & Maniatis, eds., 1989).

[0241] In the alternative, chemical synthesis can be carried out in order to obtain nucleic acid probes having nucleotide sequences which correspond to N-terminal and C-terminal portions of the amino acid sequence of the polypeptide of interest. The synthesized nucleic acid probes may be used as primers in a polymerase chain reaction (PCR) carried out in accordance with recognized PCR techniques, essentially according to PCR Protocols, “A Guide to Methods and Applications,” Academic Press, Michael, et al., eds., 1990, utilizing the appropriate chromosomal or cDNA library to obtain the fragment of the present invention.

[0242] One skilled in the art can readily design such probes based on the sequence disclosed herein using methods of computer alignment and sequence analysis known in the art (“Molecular Cloning: A Laboratory Manual,” 1989, supra). The hybridization probes of the present invention can be labeled by standard labeling techniques such as with a radiolabel, enzyme label, fluorescent label, biotin-avidin label, chemiluminescence, and the like. After hybridization, the probes may be visualized using known methods.

[0243] The nucleic acid probes of the present invention include RNA, as well as DNA probes, such probes being generated using techniques known in the art. The nucleic acid probe may be immobilized on a solid support. Examples of such solid supports include, but are not limited to, plastics such as polycarbonate, complex carbohydrates such as agarose and sepharose, and acrylic resins, such as polyacrylamide and latex beads. Techniques for coupling nucleic acid probes to such solid supports are well known in the art.

[0244] The test samples suitable for nucleic acid probing methods of the present invention include, for example, cells or nucleic acid extracts of cells, or biological fluids. The samples used in the above-described methods will vary based on the assay format, the detection method and the nature of the tissues, cells or extracts to be assayed. Methods for preparing nucleic acid extracts of cells are well known in the art and can be readily adapted in order to obtain a sample which is compatible with the method utilized.

[0245] One method of detecting the presence of nucleic acids of the invention in a sample comprises (a) contacting said sample with the above-described nucleic acid probe under conditions such that hybridization occurs, and (b) detecting the presence of said probe bound to said nucleic acid molecule. One skilled in the art would select the nucleic acid probe according to techniques known in the art as described above. Samples to be tested include but should not be limited to RNA samples of human tissue.

[0246] A kit for detecting the presence of nucleic acids of the invention in a sample comprises at least one container means having disposed therein the above-described nucleic acid probe. The kit may further comprise other containers comprising one or more of the following: wash reagents and reagents capable of detecting the presence of bound nucleic acid probe. Examples of detection reagents include, but are not limited to radiolabelled probes, enzymatic labeled probes (horseradish peroxidase, alkaline phosphatase), and affinity labeled probes (biotin, avidin, or streptavidin). Preferably, the kit further comprises instructions for use.

[0247] In detail, a compartmentalized kit includes any kit in which reagents are contained in separate containers. Such containers include small glass containers, plastic containers or strips of plastic or paper. Such containers allow the efficient transfer of reagents from one compartment to another compartment such that the samples and reagents are not cross-contaminated and the agents or solutions of each container can be added in a quantitative fashion from one compartment to another. Such containers will include a container which will accept the test sample, a container which contains the probe or primers used in the assay, containers which contain wash reagents (such as phosphate buffered saline, Tris-buffers, and the like), and containers which contain the reagents used to detect the hybridized probe, bound antibody, amplified product, or the like. One skilled in the art will readily recognize that the nucleic acid probes described in the present invention can readily be incorporated into one of the established kit formats which are well known in the art.

### Categorization of the Polypeptides According to the Invention

[0248] For a number of protein kinases of the invention, there is provided a classification of the protein class and family to which it belongs, a summary of non-catalytic protein motifs, as well as a chromosomal location, which provides information on function, regulation and/or therapeutic utility for each of the proteins. Amplification of chromosomal region can be associated with various cancers. For amplicons discussed in this application, the source of information was Knuutila, et al. (Knuutila S, Björkqvist A-M, Autio K, Tarkkanen M, Wolf M, Monni O, Szymanska J, Larramendy M L, Tapper J, Pere H, El-Rifai W, Hemmer S, Wasenius V-M, Vidgren V & Zhu Y: DNA copy number amplifications in human neoplasms. Review of comparative genomic hybridization studies. Am J Pathol 152: 1107-1123, 1998. http://www.helsinki.fi/˜lgl_www/CMG.html).

[0249] The kinase classification and protein domains often reflect pathways, cellular roles, or mechanisms of up- or down-stream regulation. Also disease-relevant genes often occur in families of related genes. For example, if one member of a kinase family functions as an oncogene, a tumor suppressor, or has been found to be disrupted in an immune, neurologic, cardiovascular, or metabolic disorder, frequently other family members may play a similar role.

[0250] Chromosomal location can identify candidate targets for a tumor amplicon or a tumor-suppressor locus. Summaries of prevalent tumor amplicons are available in the literature, and can identify tumor types to experimentally be confirmed to contain amplified copies of a kinase gene which localizes to an adjacent region.

[0251] As described herein, the polypeptides of the present invention can be classified. The salient features related to the biological and clinical implications of these different groups are described hereafter in more general terms.

[0252] A more specific characterization of the polypeptides of the invention, including potential biological and clinical implications, is provided, e.g., in EXAMPLES 2a and 2b.

### Classification of Polypeptides Exhibiting Kinase Activity

[0253] The classification of the polypeptides described in this application is found in Tables 1 and 2. The present application describes members of the following superfamilies: protein kinase, lipid kinase, atypical protein kinase. The present application also describes members of the following groups: CAMK Group, CK1 (or CK1) Group, CMGC Group, STE Group, TK Group, DAG (diacylglycerol) Group, BRD Group.***

[0254] Potential biological and clinical implications of these novel kinases are described below.

### Therapeutic Methods According to the Invention

Diagnostics:

[0255] The invention provides methods for detecting a polypeptide in a sample as a diagnostic tool for diseases or disorders, wherein the method comprises the steps of: (a) contacting the sample with a nucleic acid probe which hybridizes under hybridization assay conditions to a nucleic acid target region of a polypeptide selected from the group consisting of SEQ ID NO: 67 through 132, said probe comprising the nucleic acid sequence encoding the polypeptide, fragments thereof, and the complements of the sequences and fragments; and (b) detecting the presence or amount of the probe: target region hybrid as an indication of the disease.

[0256] In preferred embodiments of the invention, the disease or disorder is selected from the group consisting of rheumatoid arthritis, atherosclerosis, autoimmune disorders, organ transplantation, myocardial infarction, cardiomyopathies, stroke, renal failure, oxidative stress-related neurodegenerative disorders, metabolic disorder including diabetes, reproductive disorders including infertility, and cancer.

[0257] Hybridization conditions should be such that hybridization occurs only with the genes in the presence of other nucleic acid molecules. Under stringent hybridization conditions only highly complementary nucleic acid sequences hybridize. Preferably, such conditions prevent hybridization of nucleic acids having 1 or 2 mismatches out of 20 contiguous nucleotides. Such conditions are defined supra.

[0258] The diseases for which detection of genes in a sample could be diagnostic include diseases in which nucleic acid (DNA and/or RNA) is amplified in comparison to normal cells. By “amplification” is meant increased numbers of DNA or RNA in a cell compared with normal cells.

[0259] “Amplification” as it refers to RNA can be the detectable presence of RNA in cells, since in some normal cells there is no basal expression of RNA. In other normal cells, a basal level of expression exists, therefore in these cases amplification is the detection of at least 1-2-fold, and preferably more, compared to the basal level.

[0260] The diseases that could be diagnosed by detection of nucleic acid in a sample preferably include cancers. The test samples suitable for nucleic acid probing methods of the present invention include, for example, cells or nucleic acid extracts of cells, or biological fluids. The samples used in the above-described methods will vary based on the assay format, the detection method and the nature of the tissues, cells or extracts to be assayed. Methods for preparing nucleic acid extracts of cells are well known in the art and can be readily adapted in order to obtain a sample that is compatible with the method utilized.

Antibodies, Hybridomas, Methods of Use and Kits for Detection of Kinases

[0261] The present invention relates to an antibody having binding affinity to a kinase of the invention. The polypeptide may have the amino acid sequence selected from the group consisting of those set forth in SEQ ID NO: 67 through 132, or a functional derivative thereof, or at least 9 contiguous amino acids thereof (preferably, at least 20, 30, 35, or 40 contiguous amino acids thereof).

[0262] The present invention also relates to an antibody having specific binding affinity to a kinase of the invention. Such an antibody may be isolated by comparing its binding affinity to a kinase of the invention with its binding affinity to other polypeptides. Those which bind selectively to a kinase of the invention would be chosen for use in methods requiring a distinction between a kinase of the invention and other polypeptides. Such methods could include, but should not be limited to, the analysis of altered kinase expression in tissue containing other polypeptides.

[0263] The kinases of the present invention can be used in a variety of procedures and methods, such as for the generation of antibodies, for use in identifying pharmaceutical compositions, and for studying DNA/protein interaction.

[0264] The kinases of the present invention can be used to produce antibodies or hybridomas. One skilled in the art will recognize that if an antibody is desired, such a peptide could be generated as described herein and used as an immunogen. The antibodies of the present invention include monoclonal and polyclonal antibodies, as well fragments of these antibodies, and humanized forms. Humanized forms of the antibodies of the present invention may be generated using one of the procedures known in the art such as chimerization or CDR grafting.

[0265] The present invention also relates to a hybridoma which produces the above-described monoclonal antibody or binding fragment thereof. A hybridoma is an immortalized cell line which is capable of secreting a specific monoclonal antibody.

[0266] In general, techniques for preparing monoclonal antibodies and hybridomas are well known in the art (Campbell, “Monoclonal Antibody Technology: Laboratory Techniques in Biochemistry and Molecular Biology,” Elsevier Science Publishers, Amsterdam, The Netherlands, 1984; St. Groth et al., J. Immunol. Methods 35: 1-21, 1980). Any animal (mouse, rabbit, and the like) which is known to produce antibodies can be immunized with the selected polypeptide. Methods for immunization are well known in the art. Such methods include subcutaneous or intraperitoneal injection of the polypeptide. One skilled in the art will recognize that the amount of polypeptide used for immunization will vary based on the animal which is immunized, the antigenicity of the polypeptide and the site of injection.

[0267] The polypeptide may be modified or administered in an adjuvant in order to increase the peptide antigenicity. Methods of increasing the antigenicity of a polypeptide are well known in the art. Such procedures include coupling the antigen with a heterologous protein (such as globulin or β-galactosidase) or through the inclusion of an adjuvant during immunization.

[0268] For monoclonal antibodies, spleen cells from the immunized animals are removed, fused with myeloma cells, such as SP2/0-Ag14 myeloma cells, and allowed to become monoclonal antibody producing hybridoma cells. Any one of a number of methods well known in the art can be used to identify the hybridoma cell which produces an antibody with the desired characteristics. These include screening the hybridomas with an ELISA assay, western blot analysis, or radioimmunoassay (Lutz et al., Exp. Cell Res. 175: 109-124, 1988). Hybridomas secreting the desired antibodies are cloned and the class and subclass are determined using procedures known in the art (Campbell, “Monoclonal Antibody Technology: Laboratory Techniques in Biochemistry and Molecular Biology,” supra, 1984).

[0269] For polyclonal antibodies, antibody-containing antisera is isolated from the immunized animal and is screened for the presence of antibodies with the desired specificity using one of the above-described procedures. The above-described antibodies may be detectably labeled. Antibodies can be detectably labeled through the use of radioisotopes, affinity labels (such as biotin, avidin, and the like), enzymatic labels (such as horseradish peroxidase, alkaline phosphatase, and the like) fluorescent labels (such as FITC or rhodamine, and the like), paramagnetic atoms, and the like. Procedures for accomplishing such labeling are well-known in the art, for example, see Stemberger et al., J. Histochem. Cytochem. 18: 315, 1970; Bayer et al., Meth. Enzym. 62: 308, 1979; Engval et al., Immunol. 109: 129, 1972; Goding, J. Immunol. Meth. 13: 215, 1976. The labeled antibodies of the present invention can be used for in vitro, in vivo, and in situ assays to identify cells or tissues which express a specific peptide.

[0270] The above-described antibodies may also be immobilized on a solid support. Examples of such solid supports include plastics such as polycarbonate, complex carbohydrates such as agarose and sepharose, acrylic resins such as polyacrylamide and latex beads. Techniques for coupling antibodies to such solid supports are well known in the art (Weir et al., “Handbook of Experimental Immunology” 4th Ed., Blackwell Scientific Publications, Oxford, England, Chapter 10, 1986; Jacoby et al., Meth. Enzym. 34, Academic Press, N.Y., 1974). The immobilized antibodies of the present invention can be used for in vitro, in vivo, and in situ assays as well as in immunochromotography.

[0271] Furthermore, one skilled in the art can readily adapt currently available procedures, as well as the techniques, methods and kits disclosed herein with regard to antibodies, to generate peptides capable of binding to a specific peptide sequence in order to generate rationally designed antipeptide peptides (Hurby et al., “Application of Synthetic Peptides: Antisense Peptides,” In Synthetic Peptides, A User's Guide, W.H. Freeman, NY, pp. 289-307, 1992; Kaspczak et al., Biochemistry 28: 9230-9238, 1989).

[0272] Anti-peptide peptides can be generated by replacing the basic amino acid residues found in the peptide sequences of the kinases of the invention with acidic residues, while maintaining hydrophobic and uncharged polar groups. For example, lysine, arginine, and/or histidine residues are replaced with aspartic acid or glutamic acid and glutamic acid residues are replaced by lysine, arginine or histidine.

[0273] The present invention also encompasses a method of detecting a kinase polypeptide in a sample, comprising: (a) contacting the sample with an above-described antibody, under conditions such that immunocomplexes form, and (b) detecting the presence of said antibody bound to the polypeptide. In detail, the methods comprise incubating a test sample with one or more of the antibodies of the present invention and assaying whether the antibody binds to the test sample. Altered levels of a kinase of the invention in a sample as compared to normal levels may indicate disease.

[0274] Conditions for incubating an antibody with a test sample vary. Incubation conditions depend on the format employed in the assay, the detection methods employed, and the type and nature of the antibody used in the assay. One skilled in the art will recognize that any one of the commonly available immunological assay formats (such as radioimmunoassays, enzyme-linked immunosorbent assays, diffusion-based Ouchterlony, or rocket immunofluorescent assays) can readily be adapted to employ the antibodies of the present invention. Examples of such assays can be found in Chard (“An Introduction to Radioimmunoassay and Related Techniques” Elsevier Science Publishers, Amsterdam, The Netherlands, 1986), Bullock et al. (“Techniques in Immunocytochemistry,” Academic Press, Orlando, Fla. Vol. 1, 1982; Vol. 2, 1983; Vol. 3, 1985), Tijssen (“Practice and Theory of Enzyme Immunoassays: Laboratory Techniques in Biochemistry and Molecular Biology,” Elsevier Science Publishers, Amsterdam, The Netherlands, 1985).

[0275] The immunological assay test samples of the present invention include cells, protein or membrane extracts of cells, or biological fluids such as blood, serum, plasma, or urine. The test samples used in the above-described method will vary based on the assay format, nature of the detection method and the tissues, cells or extracts used as the sample to be assayed. Methods for preparing protein extracts or membrane extracts of cells are well known in the art and can readily be adapted in order to obtain a sample which is testable with the system utilized.

[0276] A kit contains all the necessary reagents to carry out the previously described methods of detection. The kit may comprise: (i) a first container means containing an above-described antibody, and (ii) second container means containing a conjugate comprising a binding partner of the antibody and a label. In another preferred embodiment, the kit further comprises one or more other containers comprising one or more of the following: wash reagents and reagents capable of detecting the presence of bound antibodies.

[0277] Examples of detection reagents include, but are not limited to, labeled secondary antibodies, or in the alternative, if the primary antibody is labeled, the chromophoric, enzymatic, or antibody binding reagents which are capable of reacting with the labeled antibody. The compartmentalized kit may be as described above for nucleic acid probe kits. One skilled in the art will readily recognize that the antibodies described in the present invention can readily be incorporated into one of the established kit formats which are well known in the art.

Isolation of Compounds Capable of Interacting with Kinases

[0278] The present invention also relates to a method of detecting a compound capable of binding to a kinase of the invention comprising incubating the compound with a kinase of the invention and detecting the presence of the compound bound to the kinase. The compound may be present within a complex mixture, for example, serum, body fluid, or cell extracts.

[0279] The present invention also relates to a method of detecting an agonist or antagonist of kinase activity or kinase binding partner activity comprising incubating cells that produce a kinase of the invention in the presence of a compound and detecting changes in the level of kinase activity or kinase binding partner activity.

[0280] The compounds thus identified would produce a change in activity indicative of the presence of the compound. The compound may be present within a complex mixture, for example, serum, body fluid, or cell extracts. Once the compound is identified it can be isolated using techniques well known in the art.

[0281] Modulating Polypeptide Activity:

[0282] The invention additionally provides methods for treating a disease or abnormal condition by administering to a patient in need of such treatment a substance that modulates the activity of a polypeptide selected from the group consisting of SEQ ID NO: 67 through 132. Preferably, the disease is selected from the group consisting of rheumatoid arthritis, atherosclerosis, autoimmune disorders, organ transplantation, myocardial infarction, cardiomyopathies, stroke, renal failure, oxidative stress-related neurodegenerative disorders, metabolic and reproductive disorders, and cancer.

[0283] Substances useful for treatment of disorders or diseases preferably show positive results in one or more assays for an activity corresponding to treatment of the disease or disorder in question Substances that modulate the activity of the polypeptides preferably include, but are not limited to, antisense oligonucleotides and inhibitors of protein kinases.

[0284] The term “preventing” refers to decreasing the probability that an organism contracts or develops an abnormal condition.

[0285] The term “treating” refers to having a therapeutic effect and at least partially alleviating or abrogating an abnormal condition in the organism.

[0286] The term “therapeutic effect” refers to the inhibition or activation factors causing or contributing to the abnormal condition. A therapeutic effect relieves to some extent one or more of the symptoms of the abnormal condition. In reference to the treatment of abnormal conditions, a therapeutic effect can refer to one or more of the following: (a) a decrease in the proliferation, growth, and/or differentiation of cells; (b) inhibition (, slowing or stopping) of cell death; (c) inhibition of degeneration; (d) relieving to some extent one or more of the symptoms associated with the abnormal condition; and (e) enhancing the function of the affected population of cells. Compounds demonstrating efficacy against abnormal conditions can be identified as described herein.

[0287] The term “abnormal condition” refers to a function in the cells or tissues of an organism that deviates from their normal functions in that organism. An abnormal condition can relate to cell proliferation, cell differentiation or cell survival. An abnormal condition may also include irregularities in cell cycle progression, i.e., irregularities in normal cell cycle progression through mitosis and meiosis.

[0288] Abnormal cell proliferative conditions include cancers such as fibrotic and mesangial disorders, abnormal angiogenesis and vasculogenesis, wound healing, psoriasis, diabetes mellitus, and inflammation.

[0289] Abnormal differentiation conditions include, but are not limited to, neurodegenerative disorders, slow wound healing rates, and slow tissue grafting healing rates.

[0290] Abnormal cell survival conditions may also relate to conditions in which programmed cell death (apoptosis) pathways are activated or abrogated. A number of protein kinases are associated with the apoptosis pathways. Aberrations in the function of any one of the protein kinases could lead to cell immortality or premature cell death.

[0291] The term “aberration,” in conjunction with the function of a kinase in a signal transduction process, refers to a kinase that is over- or under-expressed in an organism, mutated such that its catalytic activity is lower or higher than wild-type protein kinase activity, mutated such that it can no longer interact with a natural binding partner, is no longer modified by another protein kinase or protein phosphatase, or no longer interacts with a natural binding partner.

[0292] The term “administering” relates to a method of incorporating a compound into cells or tissues of an organism. The abnormal condition can be prevented or treated when the cells or tissues of the organism exist within the organism or outside of the organism. Cells existing outside the organism can be maintained or grown in cell culture dishes. For cells harbored within the organism, many techniques exist in the art to administer compounds, including (but not limited to) oral, parenteral, dermal, injection, and aerosol applications. For cells outside of the organism, multiple techniques exist in the art to administer the compounds, including (but not limited to) cell microinjection techniques, transformation techniques and carrier techniques.

[0293] The abnormal condition can also be prevented or treated by administering a compound to a group of cells having an aberration in a signal transduction pathway to an organism. The effect of administering a compound on organism function can then be monitored. The organism is preferably a mouse, rat, rabbit, guinea pig or goat, more preferably a monkey or ape, and most preferably a human.

[0294] The present invention also encompasses a method of agonizing (stimulating) or antagonizing kinase associated activity in a mammal comprising administering to said mammal an agonist or antagonist to a kinase of the invention in an amount sufficient to effect said agonism or antagonism. A method of treating diseases in a mammal with an agonist or antagonist of the activity of one of the kinases of the invention comprising administering the agonist or antagonist to a mammal in an amount sufficient to agonize or antagonize kinase-associated functions is also encompassed in the present application.

[0295] In an effort to discover novel treatments for diseases, biomedical researchers and chemists have designed, synthesized, and tested molecules that inhibit the function of protein kinases. Some small organic molecules form a class of compounds that modulate the function of protein kinases. Examples of molecules that have been reported to inhibit the function of some protein kinases include, but are not limited to, bis monocyclic, bicyclic or heterocyclic aryl compounds (PCT WO 92/20642, published Nov. 26, 1992 by Maguire et al.), vinylene-azaindole derivatives (PCT WO 94/14808, published Jul. 7, 1994 by Ballinari et al.), 1-cyclopropyl-4-pyridyl-quinolones (U.S. Pat. No. 5,330,992), styryl compounds (U.S. Pat. No. 5,217,999), styryl-substituted pyridyl compounds (U.S. Pat. No. 5,302,606), certain quinazoline derivatives (EP Application No. 0 566 266 A1), seleoindoles and selenides (PCT WO 94/03427, published Feb. 17, 1994 by Denny et al.), tricyclic polyhydroxylic compounds (PCT WO 92/21660, published Dec. 10, 1992 by Dow), and benzylphosphonic acid compounds (PCT WO 91/15495, published Oct. 17, 1991 by Dow et al).

[0296] Compounds that can traverse cell membranes and are resistant to acid hydrolysis are potentially advantageous as therapeutics as they can become highly bioavailable after being administered orally to patients. However, many of these protein kinase inhibitors only weakly inhibit the function of protein kinases. In addition, many inhibit a variety of protein kinases and will therefore cause multiple side-effects as therapeutics for diseases.

[0297] Some indolinone compounds, however, form classes of acid resistant and membrane permeable organic molecules. WO 96/22976 (published Aug. 1, 1996 by Ballinari et al.) describes hydrosoluble indolinone compounds that harbor tetralin, naphthalene, quinoline, and indole substitutents fused to the oxindole ring. These bicyclic substitutents are in turn substituted with polar moieties including hydroxylated alkyl, phosphate, and ether moieties. U.S. patent application Ser. No. 08/702,232, filed Aug. 23, 1996, entitled “Indolinone Combinatorial Libraries and Related Products and Methods for the Treatment of Disease” by Tang et al. (Lyon & Lyon Docket No. 221/187) and 08/485,323, filed Jun. 7, 1995, entitled “Benzylidene-Z-Indoline Compounds for the Treatment of Disease” by Tang et al. (Lyon & Lyon Docket No. 223/298) and International Patent Publications WO 96/40116, published Dec. 19, 1996 by Tang, et al., and WO 96/22976, published Aug. 1, 1996 by Ballinari et al., all of which are incorporated herein by reference in their entirety, including any drawings, figures, or tables, describe indolinone chemical libraries of indolinone compounds harboring other bicyclic moieties as well as monocyclic moieties fused to the oxindole ring application Ser. No. 08/702,232, filed Aug. 23, 1996, entitled “Indolinone Combinatorial Libraries and Related Products and Methods for the Treatment of Disease” by Tang et al. (Lyon & Lyon Docket No. 221/187), 08/485,323, filed Jun. 7, 1995, entitled “Benzylidene-Z-Indoline Compounds for the Treatment of Disease” by Tang et al. (Lyon & Lyon Docket No. 223/298), and WO 96/22976, published Aug. 1, 1996 by Ballinari et al. teach methods of indolinone synthesis, methods of testing the biological activity of indolinone compounds in cells, and inhibition patterns of indolinone derivatives.

[0298] Other examples of substances capable of modulating kinase activity include, but are not limited to, tyrphostins, quinazolines, quinoxolines, and quinolines. The quinazolines, tyrphostins, quinolines, and quinoxolines referred to above include well known compounds such as those described in the literature. For example, representative publications describing quinazolines include Barker et al., EPO Publication No. 0 520 722 A1; Jones et al., U.S. Pat. No. 4,447,608; Kabbe et al., U.S. Pat. No. 4,757,072; Kaul and Vougioukas, U.S. Pat. No. 5,316,553; Kreighbaum and Corner, U.S. Pat. No. 4,343,940; Pegg and Wardleworth, EPO Publication No. 0 562 734 A1; Barker et al., (1991) Proc. of Am. Assoc. for Cancer Research 32: 327; Bertino, J. R., (1979) Cancer Research 3: 293-304; Bertino, J. R., (1979) Cancer Research 9(2 part 1): 293-304; Curtin et al., (1986) Br. J. Cancer 53: 361-368; Fernandes et al., (1983) Cancer Research 43: 111-7-1123; Ferris et al. J. Org. Chem. 44(2): 173-178; Fry et al., (1994) Science 265: 1093-1095; Jackman et al., (1981) Cancer Research 51: 5579-5586; Jones et al. J. Med. Chem. 29(6): 1114-1118; Lee and Skibo, (1987) Biochemistry 26(23): 7355-7362; Lemus et al., (1989). J. Org. Chem. 54: 3511-3518; Ley and Seng, (1975) Synthesis 1975: 415-522; Maxwell et al., (1991) Magnetic Resonance in Medicine 17: 189-196; Mini et al., (1985) Cancer Research 45: 325-330; Phillips and Castle, J. (1980) Heterocyclic Chem. 17(19): 1489-1596; Reece et al., (1977) Cancer Research 47(11): 2996-2999; Sculier et al., (1986) Cancer Immunol. and Immunother. 23, A65; Sikora et al., (1984) Cancer Letters 23: 289-295; Sikora et al., (1988) Analytical Biochem. 172: 344-355; all of which are incorporated herein by reference in their entirety, including any drawings.

[0299] Quinoxaline is described in Kaul and Vougioukas, U.S. Pat. No. 5,316,553, incorporated herein by reference in its entirety, including any drawings.

[0300] Quinolines are described in Dolle et al., (1994) J. Med. Chem. 37: 2627-2629; MaGuire, J. (1994) Med. Chem. 37: 2129-2131; Burke et al., (1993) J. Med. Chem. 36: 425-432; and Burke et al. (1992) BioOrganic Med. Chem. Letters 2: 1771-1774, all of which are incorporated by reference in their entirety, including any drawings.

[0301] Tyrphostins are described in Allen et al., (1993) Clin. Exp. Immunol. 91: 141-156; Anafi et al., (1993) Blood 82: 12, 3524-3529; Baker et al., (1992) J. Cell Sci. 102: 543-555; Bilder et al., (1991) Amer. Physiol. Soc. pp. 6363-6143: C721-C730; Brunton et al., (1992) Proceedings of Amer. Assoc. Cancer Rsch. 33: 558; Bryckaert et al., (1992) Exp. Cell Research 199: 255-261; Dong et al., (1993) J. Leukocyte Biology 53: 53-60; Dong et al., (1993) J. Immunol. 151(5): 2717-2724; Gazit et al., (1989) J. Med. Chem. 32, 2344-2352; Gazit et al., (1993) J. Med. Chem. 36: 3556-3564; Kaur et al., (1994) Anti-Cancer Drugs 5: 213-222; King et al., (1991) Biochem. J. 275: 413-418; Kuo et al., (1993) Cancer Letters 74: 197-202; Levitzki, A., (1992) The FASEB J. 6: 3275-3282; Lyall et al., (1989) J. Biol. Chem. 264: 14503-14509; Peterson et al., (1993) The Prostate 22: 335-345; Pillemer et al., (1992) Int. J. Cancer 50: 80-85; Posner et al., (1993) Molecular Pharmacology 45: 673-683; Rendu et al., (1992) Biol. Pharmacology 44(5): 881-888; Sauro and Thomas, (1993) Life Sciences 53: 371-376; Sauro and Thomas, (1993) J. Pharm. and Experimental Therapeutics 267(3): 119-1125; Wolbring et al., (1994) J. Biol. Chem. 269(36): 22470-22472; and Yoneda et al., (1991) Cancer Research 51: 4430-4435; all of which are incorporated herein by reference in their entirety, including any drawings.

[0302] Other compounds that could be used as modulators include oxindolinones such as those described in U.S. patent application Ser. No. 08/702,232 filed Aug. 23, 1996, incorporated herein by reference in its entirety, including any drawings.

### Recombinant DNA Technology

DNA Constructs Comprising a Kinase Nucleic Acid Molecule and Cells Containing These Constructs:

[0303] The present invention also relates to a recombinant DNA molecule comprising, 5′ to 3′, a promoter effective to initiate transcription in a host cell and the above-described nucleic acid molecules. In addition, the present invention relates to a recombinant DNA molecule comprising a vector and an above-described nucleic acid molecule. The present invention also relates to a nucleic acid molecule comprising a transcriptional region functional in a cell, a sequence complementary to an RNA sequence encoding an amino acid sequence corresponding to the above-described polypeptide, and a transcriptional termination region functional in said cell. The above-described molecules may be isolated and/or purified DNA molecules.

[0304] The present invention also relates to a cell or organism that contains an above-described nucleic acid molecule and thereby is capable of expressing a polypeptide. The polypeptide may be purified from cells which have been altered to express the polypeptide. A cell is said to be “altered to express a desired polypeptide” when the cell, through genetic manipulation, is made to produce a protein which it normally does not produce or which the cell normally produces at lower levels. One skilled in the art can readily adapt procedures for introducing and expressing either genomic, cDNA, or synthetic sequences into either eukaryotic or prokaryotic cells.

[0305] A nucleic acid molecule, such as DNA, is said to be “capable of expressing” a polypeptide if it contains nucleotide sequences which contain transcriptional and translational regulatory information and such sequences are “operably linked” to nucleotide sequences which encode the polypeptide. An operable linkage is a linkage in which the regulatory DNA sequences and the DNA sequence sought to be expressed are connected in such a way as to permit gene sequence expression. The precise nature of the regulatory regions needed for gene sequence expression may vary from organism to organism, but shall in general include a promoter region which, in prokaryotes, contains both the promoter (which directs the initiation of RNA transcription) as well as the DNA sequences which, when transcribed into RNA, will signal synthesis initiation. Such regions will normally include those 5′-non-coding sequences involved with initiation of transcription and translation, such as the TATA box, capping sequence, CAAT sequence, and the like.

[0306] If desired, the non-coding region 3′ to the sequence encoding a kinase of the invention may be obtained by the above-described methods. This region may be retained for its transcriptional termination regulatory sequences, such as termination and polyadenylation. Thus, by retaining the 3′-region naturally contiguous to the DNA sequence encoding a kinase of the invention, the transcriptional termination signals may be provided. Where the transcriptional termination signals are not satisfactorily functional in the expression host cell, then a 3′ region functional in the host cell may be substituted.

[0307] Two DNA sequences (such as a promoter region sequence and a sequence encoding a kinase of the invention) are said to be operably linked if the nature of the linkage between the two DNA sequences does not (1) result in the introduction of a frame-shift mutation, (2) interfere with the ability of the promoter region sequence to direct the transcription of a gene sequence encoding a kinase of the invention, or (3) interfere with the ability of the gene sequence of a kinase of the invention to be transcribed by the promoter region sequence. Thus, a promoter region would be operably linked to a DNA sequence if the promoter were capable of effecting transcription of that DNA sequence. Thus, to express a gene encoding a kinase of the invention, transcriptional and translational signals recognized by an appropriate host are necessary.

[0308] The present invention encompasses the expression of a gene encoding a kinase of the invention (or a functional derivative thereof) in either prokaryotic or eukaryotic cells. Prokaryotic hosts are, generally, very efficient and convenient for the production of recombinant proteins and are, therefore, one type of preferred expression system for kinases of the invention. Prokaryotes most frequently are represented by various strains of E. coli. However, other microbial strains may also be used, including other bacterial strains.

[0309] In prokaryotic systems, plasmid vectors that contain replication sites and control sequences derived from a species compatible with the host may be used. Examples of suitable plasmid vectors may include pBR322, pUC118, pUC119 and the like; suitable phage or bacteriophage vectors may include λgt110, λgt11 and the like; and suitable virus vectors may include pMAM-neo, pKRC and the like. Preferably, the selected vector of the present invention has the capacity to replicate in the selected host cell.

[0310] Recognized prokaryotic hosts include bacteria such as E. coli, Bacillus, Streptomyces, Pseudomonas, Salmonella, Serratia, and the like. However, under such conditions, the polypeptide will not be glycosylated. The prokaryotic host must be compatible with the replicon and control sequences in the expression plasmid.

[0311] To express a kinase of the invention (or a functional derivative thereof) in a prokaryotic cell, it is necessary to operably link the sequence encoding the kinase of the invention to a functional prokaryotic promoter. Such promoters may be either constitutive or, more preferably, regulatable (i.e., inducible or derepressible). Examples of constitutive promoters include the int promoter of bacteriophage λ, the bla promoter of the β-lactamase gene sequence of pBR322, and the cat promoter of the chloramphenicol acetyl transferase gene sequence of pPR325, and the like. Examples of inducible prokaryotic promoters include the major right and left promoters of bacteriophage λ (P_{L} and P_{R}), the trp, λrecA, acZ, λacI, and gal promoters of E. coli, the α-amylase (Ulmanen et al., J. Bacteriol. 162: 176-182, 1985) and the ζ-28-specific promoters of B. subtilis (Gilman et al., Gene Sequence 32: 11-20, 1984), the promoters of the bacteriophages of Bacillus (Gryczan, in: The Molecular Biology of the Bacilli, Academic Press, Inc., NY, 1982), and Streptomyces promoters (Ward et al., Mol. Gen. Genet. 203: 468-478, 1986). Prokaryotic promoters are reviewed by Glick (Ind. Microbiot. 1: 277-282, 1987), Cenatiempo (Biochimie 68: 505-516, 1986), and Gottesman (Ann. Rev. Genet. 18: 415-442, 1984).

[0312] Proper expression in a prokaryotic cell also requires the presence of a ribosome-binding site upstream of the gene sequence-encoding sequence. Such ribosome-binding sites are disclosed, for example, by Gold et al. (Ann. Rev. Microbiol. 35: 365-404, 1981). The selection of control sequences, expression vectors, transformation methods, and the like, are dependent on the type of host cell used to express the gene. As used herein, “cell,” “cell line,” and “cell culture” may be used interchangeably and all such designations include progeny. Thus, the words “transformants” or “transformed cells” include the primary subject cell and cultures derived therefrom, without regard to the number of transfers. It is also understood that all progeny may not be precisely identical in DNA content, due to deliberate or inadvertent mutations. However, as defined, mutant progeny have the same functionality as that of the originally transformed cell.

[0313] Host cells which may be used in the expression systems of the present invention are not strictly limited, provided that they are suitable for use in the expression of the kinase polypeptide of interest. Suitable hosts may often include eukaryotic cells. Preferred eukaryotic hosts include, for example, yeast, fingi, insect cells, mammalian cells either in vivo, or in tissue culture. Mammalian cells which may be useful as hosts include HeLa cells, cells of fibroblast origin such as VERO or CHO-K1, or cells of lymphoid origin and their derivatives. Preferred mammalian host cells include SP2/0 and J558L, as well as neuroblastoma cell lines such as IMR 332, which may provide better capacities for correct post-translational processing.

[0314] In addition, plant cells are also available as hosts, and control sequences compatible with plant cells are available, such as the cauliflower mosaic virus 35S and 19S, and nopaline synthase promoter and polyadenylation signal sequences. Another preferred host is an insect cell, for example the Drosophila larvae. Using insect cells as hosts, the Drosophila alcohol dehydrogenase promoter can be used (Rubin, Science 240: 1453-1459, 1988). Alternatively, baculovirus vectors can be engineered to express large amounts of kinases of the invention in insect cells (Jasny, Science 238: 1653, 1987; Miller et al., in: Genetic Engineering, Vol. 8, Plenum, Setlow et al., eds., pp. 277-297, 1986).

[0315] Any of a series of yeast expression systems can be utilized which incorporate promoter and termination elements from the actively expressed sequences coding for glycolytic enzymes that are produced in large quantities when yeast are grown in mediums rich in glucose. Known glycolytic gene sequences can also provide very efficient transcriptional control signals. Yeast provides substantial advantages in that it can also carry out post-translational modifications. A number of recombinant DNA strategies exist utilizing strong promoter sequences and high copy number plasmids which can be utilized for production of the desired proteins in yeast. Yeast recognizes leader sequences on cloned mammalian genes and secretes peptides bearing leader sequences (i.e., pre-peptides). Several possible vector systems are available for the expression of kinases of the invention in a mammalian host.

[0316] A wide variety of transcriptional and translational regulatory sequences may be employed, depending upon the nature of the host. The transcriptional and translational regulatory signals may be derived from viral sources, such as adenovirus, bovine papilloma virus, cytomegalovirus, simian virus, or the like, where the regulatory signals are associated with a particular gene sequence which has a high level of expression. Alternatively, promoters from mammalian expression products, such as actin, collagen, myosin, and the like, may be employed. Transcriptional initiation regulatory signals may be selected which allow for repression or activation, so that expression of the gene sequences can be modulated. Of interest are regulatory signals which are temperature-sensitive so that by varying the temperature, expression can be repressed or initiated, or are subject to chemical (such as metabolite) regulation.

[0317] Expression of kinases of the invention in eukaryotic hosts requires the use of eukaryotic regulatory regions. Such regions will, in general, include a promoter region sufficient to direct the initiation of RNA synthesis. Preferred eukaryotic promoters include, for example, the promoter of the mouse metallothionein I gene sequence (Hamer et al., J. Mol. Appl. Gen. 1: 273-288, 1982); the TK promoter of Herpes virus (McKnight, Cell 31: 355-365, 1982); the SV40 early promoter (Benoist et al., Nature (London) 290: 304-31, 1981); and the yeast gal4 gene sequence promoter (Johnston et al., Proc. Natl. Acad. Sci. (USA) 79: 6971-6975, 1982; Silver et al., Proc. Natl. Acad. Sci. (USA) 81: 5951-5955, 1984).

[0318] Translation of eukaryotic mRNA is initiated at the codon which encodes the first methionine. For this reason, it is preferable to ensure that the linkage between a eukaryotic promoter and a DNA sequence which encodes a kinase of the invention (or a functional derivative thereof) does not contain any intervening codons which are capable of encoding a methionine (i.e., AUG). The presence of such codons results either in the formation of a fusion protein (if the AUG codon is in the same reading frame as the kinase of the invention coding sequence) or a frame-shift mutation (if the AUG codon is not in the same reading frame as the kinase of the invention coding sequence).

[0319] A nucleic acid molecule encoding a kinase of the invention and an operably linked promoter may be introduced into a recipient prokaryotic or eukaryotic cell either as a nonreplicating DNA or RNA molecule, which may either be a linear molecule or, more preferably, a closed covalent circular molecule. Since such molecules are incapable of autonomous replication, the expression of the gene may occur through the transient expression of the introduced sequence. Alternatively, permanent expression may occur through the integration of the introduced DNA sequence into the host chromosome.

[0320] A vector may be employed which is capable of integrating the desired gene sequences into the host cell chromosome. Cells which have stably integrated the introduced DNA into their chromosomes can be selected by also introducing one or more markers which allow for selection of host cells which contain the expression vector. The marker may provide for prototrophy to an auxotrophic host, biocide resistance, e.g., antibiotics, or heavy metals, such as copper, or the like. The selectable marker gene sequence can either be directly linked to the DNA gene sequences to be expressed, or introduced into the same cell by co-transfection. Additional elements may also be needed for optimal synthesis of mRNA. These elements may include splice signals, as well as transcription promoters, enhancers, and termination signals. cDNA expression vectors incorporating such elements include those described by Okayama (Mol. Cell. Biol. 3: 280-289, 1983).

[0321] The introduced nucleic acid molecule can be incorporated into a plasmid or viral vector capable of autonomous replication in the recipient host. Any of a wide variety of vectors may be employed for this purpose. Factors of importance in selecting a particular plasmid or viral vector include: the ease with which recipient cells that contain the vector may be recognized and selected from those recipient cells which do not contain the vector; the number of copies of the vector which are desired in a particular host; and whether it is desirable to be able to “shuttle” the vector between host cells of different species.

[0322] Preferred prokaryotic vectors include plasmids such as those capable of replication in E. coli (such as, for example, pBR322, ColE1, pSC101, pACYC 184, πVX; “Molecular Cloning: A Laboratory Manual,” 1989, supra). Bacillus plasmids include pC194, pC221, pT127, and the like (Gryczan, In: The Molecular Biology of the Bacilli, Academic Press, NY, pp. 307-329, 1982). Suitable Streptomyces plasmids include p1J101 (Kendall et al., J. Bacteriol. 169: 4177-4183, 1987), and streptomyces bacteriophages such as φC31 (Chater et al., In: Sixth International Symposium on Actinomycetales Biology, Akademiai Kaido, Budapest, Hungary, pp. 45-54, 1986). Pseudomonas plasmids are reviewed by John et al. (Rev. Infect. Dis. 8: 693-704, 1986), and Izaki (Jpn. J. Bacteriol. 33: 729-742, 1978).

[0323] Preferred eukaryotic plasmids include, for example, BPV, vaccinia, SV40, 2-micron circle, and the like, or their derivatives. Such plasmids are well known in the art (Botstein et al., Miami Wntr. Symp. 19: 265-274, 1982; Broach, In: “The Molecular Biology of the Yeast Saccharomyces: Life Cycle and Inheritance,” Cold Spring Harbor Laboratory, Cold Spring Harbor, N.Y., p. 445-470, 1981; Broach, Cell 28: 203-204, 1982; Bollon et al., J. Clin. Hematol. Oncol. 10: 39-48, 1980; Maniatis, In: Cell Biology: A Comprehensive Treatise, Vol. 3, Gene Sequence Expression, Academic Press, NY, pp. 563-608, 1980).

[0324] Once the vector or nucleic acid molecule containing the construct(s) has been prepared for expression, the DNA construct(s) may be introduced into an appropriate host cell by any of a variety of suitable means, i.e., transformation, transfection, conjugation, protoplast fusion, electroporation, particle gun technology, calcium phosphate-precipitation, direct microinjection, and the like. After the introduction of the vector, recipient cells are grown in a selective medium, which selects for the growth of vector-containing cells. Expression of the cloned gene(s) results in the production of a kinase of the invention, or fragments thereof. This can take place in the transformed cells as such, or following the induction of these cells to differentiate (for example, by administration of bromodeoxyuracil to neuroblastoma cells or the like). A variety of incubation conditions can be used to form the peptide of the present invention. The most preferred conditions are those which mimic physiological conditions.

Transgenic Animals:

[0325] A variety of methods are available for the production of transgenic animals associated with this invention. DNA can be injected into the pronucleus of a fertilized egg before fusion of the male and female pronuclei, or injected into the nucleus of an embryonic cell (e.g., the nucleus of a two-cell embryo) following the initiation of cell division (Brinster et al., Proc. Nat. Acad. Sci. USA 82: 4438-4442, 1985). Embryos can be infected with viruses, especially retroviruses, modified to carry inorganic-ion receptor nucleotide sequences of the invention.

[0326] Pluripotent stem cells derived from the inner cell mass of the embryo and stabilized in culture can be manipulated in culture to incorporate nucleotide sequences of the invention. A transgenic animal can be produced from such cells through implantation into a blastocyst that is implanted into a foster mother and allowed to come to term. Animals suitable for transgenic experiments can be obtained from standard commercial sources such as Charles River (Wilmington, Mass.), Taconic (Germantown, N.Y.), Harlan Sprague Dawley (Indianapolis, Ind.), etc.

[0327] The procedures for manipulation of the rodent embryo and for microinjection of DNA into the pronucleus of the zygote are well known to those of ordinary skill in the art (Hogan et al., supra). Microinjection procedures for fish, amphibian eggs and birds are detailed in Houdebine and Chourrout (Experientia 47: 897-905, 1991). Other procedures for introduction of DNA into tissues of animals are described in U.S. Pat. No. 4,945,050 (Sanford et al., Jul. 30, 1990).

[0328] By way of example only, to prepare a transgenic mouse, female mice are induced to superovulate. Females are placed with males, and the mated females are sacrificed by CO₂ asphyxiation or cervical dislocation and embryos are recovered from excised oviducts. Surrounding cumulus cells are removed. Pronuclear embryos are then washed and stored until the time of injection. Randomly cycling adult female mice are paired with vasectomized males. Recipient females are mated at the same time as donor females. Embryos then are transferred surgically. The procedure for generating transgenic rats is similar to that of mice (Hammer et al., Cell 63: 1099-1112, 1990).

[0329] Methods for the culturing of embryonic stem (ES) cells and the subsequent production of transgenic animals by the introduction of DNA into ES cells using methods such as electroporation, calcium phosphate/DNA precipitation and direct injection also are well known to those of ordinary skill in the art (Teratocarcinomas and Embryonic Stem Cells, A Practical Approach, E. J. Robertson, ed., IRL Press, 1987).

[0330] In cases involving random gene integration, a clone containing the sequence(s) of the invention is co-transfected with a gene encoding resistance. Alternatively, the gene encoding neomycin resistance is physically linked to the sequence(s) of the invention. Transfection and isolation of desired clones are carried out by any one of several methods well known to those of ordinary skill in the art (E. J. Robertson, supra).

[0331] DNA molecules introduced into ES cells can also be integrated into the chromosome through the process of homologous recombination (Capecchi, Science 244: 1288-1292, 1989). Methods for positive selection of the recombination event (i.e., neo resistance) and dual positive-negative selection (i.e., neo resistance and gancyclovir resistance) and the subsequent identification of the desired clones by PCR have been described by Capecchi, supra and Joyner et al. (Nature 338: 153-156, 1989), the teachings of which are incorporated herein in their entirety including any drawings. The final phase of the procedure is to inject targeted ES cells into blastocysts and to transfer the blastocysts into pseudopregnant females. The resulting chimeric animals are bred and the offspring are analyzed by Southern blotting to identify individuals that carry the transgene. Procedures for the production of non-rodent mammals and other animals have been discussed by others (Houdebine and Chourrout, supra; Pursel et al., Science 244: 1281-1288, 1989; and Simms et al., Bio/Technology 6: 179-183, 1988).

[0332] Thus, the invention provides transgenic, nonhuman mammals containing a transgene encoding a kinase of the invention or a gene affecting the expression of the kinase. Such transgenic nonhuman mammals are particularly useful as an in vivo test system for studying the effects of introduction of a kinase, or regulating the expression of a kinase (i.e., through the introduction of additional genes, antisense nucleic acids, or ribozymes).

[0333] A “transgenic animal” is an animal having cells that contain DNA which has been artificially inserted into a cell, which DNA becomes part of the genome of the animal which develops from that cell. Preferred transgenic animals are primates, mice, rats, cows, pigs, horses, goats, sheep, dogs and cats. The transgenic DNA may encode human kinases. Native expression in an animal may be reduced by providing an amount of antisense RNA or DNA effective to reduce expression of the receptor.

Gene Therapy:

[0334] Kinases or their genetic sequences will also be useful in gene therapy (reviewed in Miller, Nature 357: 455-460, 1992). Miller states that advances have resulted in practical approaches to human gene therapy that have demonstrated positive initial results. The basic science of gene therapy is described in Mulligan (Science 260: 926-931, 1993).

[0335] In one preferred embodiment, an expression vector containing a kinase coding sequence is inserted into cells, the cells are grown in vitro and then infused in large numbers into patients. In another preferred embodiment, a DNA segment containing a promoter of choice (for example a strong promoter) is transferred into cells containing an endogenous gene encoding kinases of the invention in such a manner that the promoter segment enhances expression of the endogenous kinase gene (for example, the promoter segment is transferred to the cell such that it becomes directly linked to the endogenous kinase gene).

[0336] The gene therapy may involve the use of an adenovirus containing kinase cDNA targeted to a tumor, systemic kinase increase by implantation of engineered cells, injection with kinase-encoding virus, or injection of naked kinase DNA into appropriate tissues.

[0337] Target cell populations may be modified by introducing altered forms of one or more components of the protein complexes in order to modulate the activity of such complexes. For example, by reducing or inhibiting a complex component activity within target cells, an abnormal signal transduction event(s) leading to a condition may be decreased, inhibited, or reversed. Deletion or missense mutants of a component, that retain the ability to interact with other components of the protein complexes but cannot function in signal transduction, may be used to inhibit an abnormal, deleterious signal transduction event.

[0338] Expression vectors derived from viruses such as retroviruses, vaccinia virus, adenovirus, adeno-associated virus, herpes viruses, several RNA viruses, or bovine papilloma virus, may be used for delivery of nucleotide sequences (e.g., cDNA) encod-ing recombinant kinase of the invention protein into the targeted cell population (e.g., tumor cells). Methods which are well known to those skilled in the art can be used to construct recombinant viral vectors containing coding sequences (Maniatis et al., Molecular Cloning: A Laboratory Manual, Cold Spring Harbor Laboratory, N.Y., 1989; Ausubel et al., Current Proto-cols in Molecular Biology, Greene Publishing Associates and Wiley Interscience, N.Y., 1989). Alter-natively, recombinant nucleic acid molecules encoding protein sequences can be used as naked DNA or in a reconstituted system e.g., liposomes or other lipid systems for delivery to target cells (e.g., Felgner et al., Nature 337: 387-8, 1989). Several other methods for the direct transfer of plasmid DNA into cells exist for use in human gene therapy and involve targeting the DNA to receptors on cells by complexing the plasmid DNA to proteins (Miller, supra).

[0339] In its simplest form, gene transfer can be performed by simply injecting minute amounts of DNA into the nucleus of a cell, through a process of microinjection (Capecchi, Cell 22: 479-88, 1980). Once recombinant genes are introduced into a cell, they can be recognized by the cell's normal mechanisms for transcription and translation, and a gene product will be expressed. Other methods have also been attempted for introducing DNA into larger numbers of cells. These methods include: transfection, wherein DNA is precipitated with calcium phosphate and taken into cells by pinocytosis (Chen et al., Mol. Cell Biol. 7: 2745-52, 1987); electroporation, wherein cells are exposed to large voltage pulses to introduce holes into the membrane (Chu et al., Nucleic Acids Res. 15: 1311-26, 1987); lipofection/liposome fusion, wherein DNA is packaged into lipophilic vesicles which fuse with a target cell (Felgner et al., Proc. Natl. Acad. Sci. USA. 84: 7413-7417, 1987); and particle bombardment using DNA bound to small projectiles (Yang et al., Proc. Natl. Acad. Sci. 87: 9568-9572, 1990). Another method for introducing DNA into cells is to couple the DNA to chemically modified proteins.

[0340] It has also been shown that adenovirus proteins are capable of destabilizing endosomes and enhancing the uptake of DNA into cells. The admixture of adenovirus to solutions containing DNA complexes, or the binding of DNA to polylysine covalently attached to adenovirus using protein crosslinking agents substantially improves the uptake and expression of the recombinant gene (Curiel et al., Am. J: Respir. Cell. Mol. Biol., 6: 247-52, 1992).

[0341] As used herein “gene transfer” means the process of introducing a foreign nucleic acid molecule into a cell. Gene transfer is commonly performed to enable the expression of a particular product encoded by the gene. The product may include a protein, polypeptide, antisense DNA or RNA, or enzymatically active RNA. Gene transfer can be performed in cultured cells or by direct administration into animals. Generally gene transfer involves the process of nucleic acid contact with a target cell by non-specific or receptor mediated interactions, uptake of nucleic acid into the cell through the membrane or by endocytosis, and release of nucleic acid into the cytoplasm from the plasma membrane or endosome. Expression may require, in addition, movement of the nucleic acid into the nucleus of the cell and binding to appropriate nuclear factors for transcription.

[0342] As used herein “gene therapy” is a form of gene transfer and is included within the definition of gene transfer as used herein and specifically refers to gene transfer to express a therapeutic product from a cell in vivo or in vitro. Gene transfer can be performed ex vivo on cells which are then transplanted into a patient, or can be performed by direct administration of the nucleic acid or nucleic acid-protein complex into the patient.

[0343] In another preferred embodiment, a vector having nucleic acid sequences encoding a kinase polypeptide is provided in which the nucleic acid sequence is expressed only in specific tissue. Methods of achieving tissue-specific gene expression are set forth in International Publication No. WO 93/09236, filed Nov. 3, 1992 and published May 13, 1993.

[0344] In all of the preceding vectors set forth above, a further aspect of the invention is that the nucleic acid sequence contained in the vector may include additions, deletions or modifications to some or all of the sequence of the nucleic acid, as defined above.

[0345] Expression, including over-expression, of a kinase polypeptide of the invention can be inhibited by administration of an antisense molecule that binds to and inhibits expression of the mRNA encoding the polypeptide. Alternatively, expression can be inhibited in an analogous manner using a ribozyme that cleaves the mRNA. General methods of using antisense and ribozyme technology to control gene expression, or of gene therapy methods for expression of an exogenous gene in this manner are well known in the art. Each of these methods utilizes a system, such as a vector, encoding either an antisense or ribozyme transcript of a kinase polypeptide of the invention.

[0346] The term “ribozyme” refers to an RNA structure of one or more RNAs having catalytic properties. Ribozymes generally exhibit endonuclease, ligase or polymerase activity. Ribozymes are structural RNA molecules which mediate a number of RNA self-cleavage reactions. Various types of trans-acting ribozymes, including “hammerhead” and “hairpin” types, which have different secondary structures, have been identified. A variety of ribozymes have been characterized. See, for example, U.S. Pat. Nos. 5,246,921, 5,225,347, 5,225,337 and 5,149,796. Mixed ribozymes comprising deoxyribo and ribooligonucleotides with catalytic activity have been described. Perreault, et al., Nature, 344: 565-567 (1990).

[0347] As used herein, “antisense” refers of nucleic acid molecules or their derivatives which specifically hybridize, e.g., bind, under cellular conditions, with the genomic DNA and/or cellular mRNA encoding a kinase polypeptide of the invention, so as to inhibit expression of that protein, for example, by inhibiting transcription and/or translation. The binding may be by conventional base pair complementarity, or, for example, in the case of binding to DNA duplexes, through specific interactions in the major groove of the double helix.

[0348] In one aspect, the antisense construct is an nucleic acid which is generated ex vivo and that, when introduced into the cell, can inhibit gene expression by, without limitation, hybridizing with the mRNA and/or genomic sequences of a kinase polynucleotide of the invention.

[0349] Antisense approaches can involve the design of oligonucleotides (either DNA or RNA) that are complementary to kinase polypeptide mRNA and are based on the kinase polynucleotides of the invention, including SEQ ID NO: 1 through 66. The antisense oligonucleotides will bind to the kinase polypeptide mRNA transcripts and prevent translation.

[0350] Although absolute complementarity is preferred, it is not required. A sequence “complementary” to a portion of an RNA, as referred to herein, means a sequence having sufficient complementarity to be able to hybridize with the RNA, forming a stable duplex; in the case of double-stranded antisense nucleic acids, a single strand of the duplex DNA may thus be tested, or triplex formation may be assayed. The ability to hybridize will depend on both the degree of complementarity and the length of the antisense nucleic acid. Generally, the longer the hybridizing nucleic acid, the more base mismatches with an RNA it may contain and still form a stable duplex (or triplex, as the case may be). One skilled in the art can ascertain a tolerable degree of mismatch by use of standard procedures to determine the melting point of the hybridized complex.

[0351] In general, oligonucleotides that are complementary to the 5′ end of the message, e.g., the 5′ untranslated sequence up to and including the AUG initiation codon, should work most efficiently at inhibiting translation. However, sequences complementary to the 3′ untranslated sequences of mRNAs have been shown to be effective at inhibiting translation of mRNAs as well. (Wagner, R. (1994) Nature 372: 333). Antisense oligonucleotides complementary to mRNA coding regions are less efficient inhibitors of translation but could be used in accordance with the invention. Whether designed to hybridize to the 5′, 3′ or coding region of the kinase polypeptide mRNA, antisense nucleic acids should be at least six nucleotides in length, and are preferably less than about 100 and more preferably less than about 50 or 30 nucleotides in length. Typically they should be between 10 and 25 nucleotides in length. Such principles will inform the practitioner in selecting the appropriate oligonucleotides In preferred embodiments, the antisense sequence is selected from an oligonucleotide sequence that comprises, consists of, or consists essentially of about 10-30, and more preferably 15-25, contiguous nucleotide bases of a nucleic acid sequence selected from the group consisting of SEQ ID NO: 1 through 66 or domains thereof.

[0352] In another preferred embodiment, the invention includes an isolated, enriched or purified nucleic acid molecule comprising, consisting of or consisting essentially of about 10-30, and more preferably 15-25 contiguous nucleotide bases of a nucleic acid sequence that encodes a polypeptide of SEQ ID NO: 67 through 132.

[0353] Using the sequences of the present invention, antisense oligonucleotides can be designed. Such antisense oligonucleotides would be administered to cells expressing the target kinase and the levels of the target RNA or protein with that of an internal control RNA or protein would be compared. Results obtained using the antisense oligonucleotide would also be compared with those obtained using a suitable control oligonucleotide. A preferred control oligonucleotide is an oligonucleotide of approximately the same length as the test oligonucleotide. Those antisense oligonucleotides resulting in a reduction in levels of target RNA or protein would be selected.

[0354] The oligonucleotides can be DNA or RNA or chimeric mixtures or derivatives or modified versions thereof, single-stranded or double-stranded. The oligonucleotide can be modified at the base moiety, sugar moiety, or phosphate backbone, for example, to improve stability of the molecule, hybridization, etc. The oligonucleotide may include other appended groups such as peptides (e.g., for targeting host cell receptors in vivo), or agents facilitating transport across the cell membrane (see, e.g., Letsinger et al. (1989) Proc. Natl. Acad. Sci. U.S.A. 86: 6553-6556; Lemaitre et al. (1987) Proc. Natl. Acad. Sci. USA 84: 648-652; PCT Publication No. WO 88/09810, published Dec. 15, 1988) or the blood-brain barrier (see, e.g., PCT Publication No. WO 89/10134, published Apr. 25, 1988), hybridization-triggered cleavage agents. (See, e.g., Krol et al. (1988) BioTechniques 6: 958-976) or intercalating agents. (See, e.g., Zon (1988) Pharm. Res. 5: 539-549). To this end, the oligonucleotide may be conjugated to another molecule, e.g., a peptide, hybridization triggered cross-linking agent, transport agent, hybridization-triggered cleavage agent, etc.

[0355] The antisense oligonucleotide may comprise at least one modified base moiety which is selected from moieties such as 5-fluorouracil, 5-bromouracil, 5-chlorouracil, 5-iodouracil, hypoxanthine, xanthine, 4-acetylcytosine, and 5-(carboxyhydroxyethyl) uracil. The antisense oligonucleotide may also comprise at least one modified sugar moiety selected from the group including but not limited to arabinose, 2-fluoroarabinose, xylulose, and hexose.

[0356] In yet another embodiment, the antisense oligonucleotide comprises at least one modified phosphate backbone selected from the group consisting of a phosphorothioate, a phosphorodithioate, a phosphoramidothioate, a phosphoramidate, a phosphordiamidate, a methylphosphonate, an alkyl phosphotriester, and a formacetal or analog thereof. (see also U.S. Pat. Nos. 5,176,996; 5,264,564; and 5,256,775)

[0357] In yet a further embodiment, the antisense oligonucleotide is an a-anomeric oligonucleotide. An α-anomeric oligonucleotide forms specific double-stranded hybrids with complementary RNA in which, contrary to the usual β-units, the strands run parallel to each other (Gautier et al. (1987) Nucl. Acids Res. 15: 6625-6641). The oligonucleotide is a 2′-O-methylribonucleotide (Inoue et al. (1987) Nucl. Acids Res. 15: 6131-6148), or a chimeric RNA-DNA analogue (Inoue et al. (1987) FEBS Lett. 215: 327-330).

[0358] Also suitable are peptidyl nucleic acids, which are polypeptides such as polyserine, polythreonine, etc. including copolymers containing various amino acids, which are substituted at side-chain positions with nucleic acids (T,A,G,C,U). Chains of such polymers are able to hybridize through complementary bases in the same manner as natural DNA/RNA. Alternatively, an antisense construct of the present invention can be delivered, for example, as an expression plasmid or vector that, when transcribed in the cell, produces RNA complementary to at least a unique portion of the cellular mRNA which encodes a kinase polypeptide of the invention.

[0359] While antisense nucleotides complementary to the kinase polypeptide coding region sequence can be used, those complementary to the transcribed untranslated region are most preferred.

[0360] In another preferred embodiment, a method of gene replacement is set forth. “Gene replacement” as used herein means supplying a nucleic acid sequence which is capable of being expressed in vivo in an animal and thereby providing or augmenting the function of an endogenous gene which is missing or defective in the animal.

### Pharmaceutical Formulations and Routes of Administration

[0361] The compounds described herein, including kinase polypeptides of the invention, antisense molecules, ribozymes, and any other compound that modulates the activity of a kinase polypeptide of the invention, can be administered to a human patient per se, or in pharmaceutical compositions where it is mixed with other active ingredients, as in combination therapy, or suitable carriers or excipient(s). Techniques for formulation and administration of the compounds of the instant application may be found in “Remington's Pharmaceutical Sciences,” Mack Publishing Co., Easton, Pa., latest edition.

Routes of Administration:

[0362] Suitable routes of administration may, for example, include oral, rectal, transmucosal, or intestinal administration; parenteral delivery, including intramuscular, subcutaneous, intravenous, intramedullary injections, as well as intrathecal, direct intraventricular, intraperitoneal, intranasal, or intraocular injections.

[0363] Alternately, one may administer the compound in a local rather than systemic manner, for example, via injection of the compound directly into a solid tumor, often in a depot or sustained release formulation.

[0364] Furthermore, one may administer the drug in a targeted drug delivery system, for example, in a liposome coated with tumor-specific antibody. The liposomes will be targeted to and taken up selectively by the tumor.

Composition/Formulation:

[0365] The pharmaceutical compositions of the present invention may be manufactured in a manner that is itself known, e.g., by means of conventional mixing, dissolving, granulating, dragee-making, levigating, emulsifying, encapsulating, entrapping or lyophilizing processes.

[0366] Pharmaceutical compositions for use in accordance with the present invention thus may be formulated in conventional manner using one or more physiologically acceptable carriers comprising excipients and auxiliaries which facilitate processing of the active compounds into preparations which can be used pharmaceutically. Proper formulation is dependent upon the route of administration chosen.

[0367] For injection, the agents of the invention may be formulated in aqueous solutions, preferably in physiologically compatible buffers such as Hanks's solution, Ringer's solution, or physiological saline buffer. For transmucosal administration, penetrants appropriate to the barrier to be permeated are used in the formulation. Such penetrants are generally known in the art.

[0368] For oral administration, the compounds can be formulated readily by combining the active compounds with pharmaceutically acceptable carriers well known in the art. Such carriers enable the compounds of the invention to be formulated as tablets, pills, dragees, capsules, liquids, gels, syrups, slurries, suspensions and the like, for oral ingestion by a patient to be treated. Suitable carriers include excipients such as, fillers such as sugars, including lactose, sucrose, mannitol, or sorbitol; cellulose preparations such as, for example, maize starch, wheat starch, rice starch, potato starch, gelatin, gum tragacanth, methyl cellulose, hydroxypropylmethyl-cellulose, sodium carboxymethylcellulose, and/or polyvinylpyrrolidone (PVP). If desired, disintegrating agents may be added, such as the cross-linked polyvinyl pyrrolidone, agar, or alginic acid or a salt thereof such as sodium alginate.

[0369] Dragee cores are provided with suitable coatings. For this purpose, concentrated sugar solutions may be used, which may optionally contain gum arabic, talc, polyvinyl pyrrolidone, carbopol gel, polyethylene glycol, and/or titanium dioxide, lacquer solutions, and suitable organic solvents or solvent mixtures. Dyestuffs or pigments may be added to the tablets or dragee coatings for identification or to characterize different combinations of active compound doses.

[0370] Pharmaceutical preparations which can be used orally include push-fit capsules made of gelatin, as well as soft, sealed capsules made of gelatin and a plasticizer, such as glycerol or sorbitol. The push-fit capsules can contain the active ingredients in admixture with filler such as lactose, binders such as starches, and/or lubricants such as talc or magnesium stearate and, optionally, stabilizers. In soft capsules, the active compounds may be dissolved or suspended in suitable liquids, such as fatty oils, liquid paraffin, or liquid polyethylene glycols. In addition, stabilizers may be added. All formulations for oral administration should be in dosages suitable for such administration.

[0371] For buccal administration, the compositions may take the form of tablets or lozenges formulated in conventional manner.

[0372] For administration by inhalation, the compounds for use according to the present invention are conveniently delivered in the form of an aerosol spray presentation from pressurized packs or a nebuliser, with the use of a suitable propellant, e.g., dichlorodifluoromethane, trichlorofluoromethane, dichlorotetrafluoroethane, carbon dioxide or other suitable gas. In the case of a pressurized aerosol the dosage unit may be determined by providing a valve to deliver a metered amount. Capsules and cartridges of e.g. gelatin for use in an inhaler or insufflator may be formulated containing a powder mix of the compound and a suitable powder base such as lactose or starch.

[0373] The compounds may be formulated for parenteral administration by injection, e.g., by bolus injection or continuous infusion. Formulations for injection may be presented in unit dosage form, e.g., in ampoules or in multi-dose containers, with an added preservative. The compositions may take such forms as suspensions, solutions or emulsions in oily or aqueous vehicles, and may contain formulatory agents such as suspending, stabilizing and/or dispersing agents.

[0374] Pharmaceutical formulations for parenteral administration include aqueous solutions of the active compounds in water-soluble form. Additionally, suspensions of the active compounds may be prepared as appropriate oily injection suspensions. Suitable lipophilic solvents or vehicles include fatty oils such as sesame oil, or synthetic fatty acid esters, such as ethyl oleate or triglycerides, or liposomes. Aqueous injection suspensions may contain substances which increase the viscosity of the suspension, such as sodium carboxymethyl cellulose, sorbitol, or dextran. Optionally, the suspension may also contain suitable stabilizers or agents which increase the solubility of the compounds to allow for the preparation of highly concentrated solutions.

[0375] Alternatively, the active ingredient may be in powder form for constitution with a suitable vehicle, e.g., sterile pyrogen-free water, before use.

[0376] The compounds may also be formulated in rectal compositions such as suppositories or retention enemas, e.g., containing conventional suppository bases such as cocoa butter or other glycerides.

[0377] In addition to the formulations described previously, the compounds may also be formulated as a depot preparation. Such long acting formulations may be administered by implantation (for example subcutaneously or intramuscularly) or by intramuscular injection. Thus, for example, the compounds may be formulated with suitable polymeric or hydrophobic materials (for example as an emulsion in an acceptable oil) or ion exchange resins, or as sparingly soluble derivatives, for example, as a sparingly soluble salt.

[0378] A pharmaceutical carrier for the hydrophobic compounds of the invention is a cosolvent system comprising benzyl alcohol, a nonpolar surfactant, a water-miscible organic polymer, and an aqueous phase. The cosolvent system may be the VPD co-solvent system. VPD is a solution of 3% w/v benzyl alcohol, 8% w/v of the nonpolar surfactant polysorbate 80, and 65% w/v polyethylene glycol 300, made up to volume in absolute ethanol. The VPD co-solvent system (VPD: D5W) consists of VPD diluted 1:1 with a 5% dextrose in water solution. This co-solvent system dissolves hydrophobic compounds well, and itself produces low toxicity upon systemic administration. Naturally, the proportions of a co-solvent system may be varied considerably without destroying its solubility and toxicity characteristics. Furthermore, the identity of the co-solvent components may be varied: for example, other low-toxicity nonpolar surfactants may be used instead of polysorbate 80; the fraction size of polyethylene glycol may be varied; other biocompatible polymers may replace polyethylene glycol, e.g. polyvinyl pyrrolidone; and other sugars or polysaccharides may substitute for dextrose.

[0379] Alternatively, other delivery systems for hydrophobic pharmaceutical compounds may be employed. Liposomes and emulsions are well known examples of delivery vehicles or carriers for hydrophobic drugs. Certain organic solvents such as dimethylsulfoxide also may be employed, although usually at the cost of greater toxicity. Additionally, the compounds may be delivered using a sustained-release system, such as semipermeable matrices of solid hydrophobic polymers containing the therapeutic agent. Various sustained-release materials have been established and are well known by those skilled in the art. Sustained-release capsules may, depending on their chemical nature, release the compounds for a few weeks up to over 100 days. Depending on the chemical nature and the biological stability of the therapeutic reagent, additional strategies for protein stabilization may be employed.

[0380] The pharmaceutical compositions also may comprise suitable solid or gel phase carriers or excipients. Examples of such carriers or excipients include but are not limited to calcium carbonate, calcium phosphate, various sugars, starches, cellulose derivatives, gelatin, and polymers such as polyethylene glycols.

[0381] Many of the tyrosine or serine/threonine kinase modulating compounds of the invention may be provided as salts with pharmaceutically compatible counterions. Pharmaceutically compatible salts may be formed with many acids, including but not limited to hydrochloric, sulfuric, acetic, lactic, tartaric, malic, succinic, etc. Salts tend to be more soluble in aqueous or other protonic solvents that are the corresponding free base forms.

Suitable Dosage Regimens:

[0382] Pharmaceutical compositions suitable for use in the present invention include compositions where the active ingredients are contained in an amount effective to achieve its intended purpose. More specifically, a therapeutically effective amount means an amount of compound effective to prevent, alleviate or ameliorate symptoms of disease or prolong the survival of the subject being treated. Determination of a therapeutically effective amount is well within the capability of those skilled in the art, especially in light of the detailed disclosure provided herein.

[0383] Methods of determining the dosages of compounds to be administered to a patient and modes of administering compounds to an organism are disclosed in U.S. application Ser. No. 08/702,282, filed Aug. 23, 1996 and International patent publication number WO 96/22976, published Aug. 1, 1996, both of which are incorporated herein by reference in their entirety, including any drawings, figures or tables. Those skilled in the art will appreciate that such descriptions are applicable to the present invention and can be easily adapted to it.

[0384] The proper dosage depends on various factors such as the type of disease being treated, the particular composition being used and the size and physiological condition of the patient. Therapeutically effective doses for the compounds described herein can be estimated initially from cell culture and animal models. For example, a dose can be formulated in animal models to achieve a circulating concentration range that initially takes into account the IC₅₀ as determined in cell culture assays. The animal model data can be used to more accurately determine useful doses in humans.

[0385] For any compound used in the methods of the invention, the therapeutically effective dose can be estimated initially from cell culture assays. For example, a dose can be formulated in animal models to achieve a circulating concentration range that includes the IC₅₀ as determined in cell culture (i.e., the concentration of the test compound which achieves a half-maximal inhibition of the tyrosine or serine/threonine kinase activity). Such information can be used to more accurately determine useful doses in humans.

[0386] Toxicity and therapeutic efficacy of the compounds described herein can be determined by standard pharmaceutical procedures in cell cultures or experimental animals, e.g., for determining the LD₅₀ (the dose lethal to 50% of the population) and the ED₅₀ (the dose therapeutically effective in 50% of the population). The dose ratio between toxic and therapeutic effects is the therapeutic index and it can be expressed as the ratio between LD₅₀ and ED₅₀. Compounds which exhibit high therapeutic indices are preferred. The data obtained from these cell culture assays and animal studies can be used in formulating a range of dosage for use in human. The dosage of such compounds lies preferably within a range of circulating concentrations that include the ED₅₀ with little or no toxicity. The dosage may vary within this range depending upon the dosage form employed and the route of administration utilized. The exact formulation, route of administration and dosage can be chosen by the individual physician in view of the patient's condition. (See e.g., Fingl et al., 1975, in “The Pharmacological Basis of Therapeutics,”, Ch. 1 p. 1).

[0387] In another example, toxicity studies can be carried out by measuring the blood cell composition. For example, toxicity studies can be carried out in a suitable animal model as follows: 1) the compound is administered to mice (an untreated control mouse should also be used); 2) blood samples are periodically obtained via the tail vein from one mouse in each treatment group; and 3) the samples are analyzed for red and white blood cell counts, blood cell composition and the percent of lymphocytes versus polymorphonuclear cells. A comparison of results for each dosing regime with the controls indicates if toxicity is present.

[0388] At the termination of each toxicity study, further studies can be carried out by sacrificing the animals (preferably, in accordance with the American Veterinary Medical Association guidelines Report of the American Veterinary Medical Assoc. Panel on Euthanasia: 229-249, 1993). Representative animals from each treatment group can then be examined by gross necropsy for immediate evidence of metastasis, unusual illness or toxicity. Gross abnormalities in tissue are noted and tissues are examined histologically. Compounds causing a reduction in body weight or blood components are less preferred, as are compounds having an adverse effect on major organs. In general, the greater the adverse effect the less preferred the compound.
[0389] For the treatment of cancers the expected daily dose of a hydrophobic pharmaceutical agent is between 1 to 500 mg/day, preferably 1 to 250 mg/day, and most preferably 1 to 50 mg/day. Drugs can be delivered less frequently provided plasma levels of the active moiety are sufficient to maintain therapeutic effectiveness.

[0390] Plasma levels should reflect the potency of the drug. Generally, the more potent the compound the lower the plasma levels necessary to achieve efficacy.

[0391] Plasma half-life and biodistribution of the drug and metabolites in the plasma, tumors and major organs can also be determined to facilitate the selection of drugs most appropriate to inhibit a disorder. Such measurements can be carried out. For example, HPLC analysis can be performed on the plasma of animals treated with the drug and the location of radiolabeled compounds can be determined using detection methods such as X-ray, CAT scan and MRI. Compounds that show potent inhibitory activity in the screening assays, but have poor pharmacokinetic characteristics, can be optimized by altering the chemical structure and retesting. In this regard, compounds displaying good pharmacokinetic characteristics can be used as a model.

[0392] Dosage amount and interval may be adjusted individually to provide plasma levels of the active moiety which are sufficient to maintain the kinase modulating effects, or minimal effective concentration (MEC). The MEC will vary for each compound but can be estimated from in vitro data; e.g., the concentration necessary to achieve 50-90% inhibition of the kinase using the assays described herein. Dosages necessary to achieve the MEC will depend on individual characteristics and route of administration. However, HPLC assays or bioassays can be used to determine plasma concentrations.

[0393] Dosage intervals can also be determined using MEC value. Compounds should be administered using a regimen which maintains plasma levels above the MEC for 10-90% of the time, preferably between 30-90% and most preferably between 50-90%.

[0394] In cases of local administration or selective uptake, the effective local concentration of the drug may not be related to plasma concentration.

[0395] The amount of composition administered will, of course, be dependent on the subject being treated, on the subject's weight, the severity of the affliction, the manner of administration and the judgment of the prescribing physician.

Packaging:

[0396] The compositions may, if desired, be presented in a pack or dispenser device which may contain one or more unit dosage forms containing the active ingredient. The pack may for example comprise metal or plastic foil, such as a blister pack. The pack or dispenser device may be accompanied by instructions for administration. The pack or dispenser may also be accompanied with a notice associated with the container in form prescribed by a governmental agency regulating the manufacture, use, or sale of pharmaceuticals, which notice is reflective of approval by the agency of the form of the polynucleotide for human or veterinary administration. Such notice, for example, may be the labeling approved by the U.S. Food and Drug Administration for prescription drugs, or the approved product insert. Compositions comprising a compound of the invention formulated in a compatible pharmaceutical carrier may also be prepared, placed in an appropriate container, and labeled for treatment of an indicated condition. Suitable conditions indicated on the label may include treatment of a tumor, inhibition of angiogenesis, treatment of fibrosis, diabetes, and the like.

### Functional Derivatives

[0397] Also provided herein are functional derivatives of a polypeptide or nucleic acid of the invention. By “functional derivative” is meant a “chemical derivative,” “fragment,” or “variant,” of the polypeptide or nucleic acid of the invention, which terms are defined below. A functional derivative retains at least a portion of the function of the protein, for example reactivity with an antibody specific for the protein, enzymatic activity or binding activity mediated through noncatalytic domains, which permits its utility in accordance with the present invention. It is well known in the art that due to the degeneracy of the genetic code numerous different nucleic acid sequences can code for the same amino acid sequence. Equally, it is also well known in the art that conservative changes in amino acid can be made to arrive at a protein or polypeptide that retains the functionality of the original. In both cases, all permutations are intended to be covered by this disclosure.

[0398] Included within the scope of this invention are the functional equivalents of the herein-described isolated nucleic acid molecules. The degeneracy of the genetic code permits substitution of certain codons by other codons that specify the same amino acid and hence would give rise to the same protein. The nucleic acid sequence can vary substantially since, with the exception of methionine and tryptophan, the known amino acids can be coded for by more than one codon. Thus, portions or all of the genes of the invention could be synthesized to give a nucleic acid sequence significantly different from one selected from the group consisting of those set forth in SEQ ID NO: 1 through SEQ ID NO: 66. The encoded amino acid sequence thereof would, however, be preserved.

[0399] In addition, the nucleic acid sequence may comprise a nucleotide sequence which results from the addition, deletion or substitution of at least one nucleotide to the 5′-end and/or the 3′-end of the nucleic acid formula selected from the group consisting of those set forth in SEQ ID NO: 1 through SEQ ID NO: 66, or a derivative thereof. Any nucleotide or polynucleotide may be used in this regard, provided that its addition, deletion or substitution does not alter the amino acid sequence of selected from the group consisting of those set forth in SEQ ID NO: 1 through 66, which is encoded by the nucleotide sequence. For example, the present invention is intended to include any nucleic acid sequence resulting from the addition of ATG as an initiation codon at the 5′-end of the inventive nucleic acid sequence or its derivative, or from the addition of TTA, TAG or TGA as a termination codon at the 3′-end of the inventive nucleotide sequence or its derivative. Moreover, the nucleic acid molecule of the present invention may, as necessary, have restriction endonuclease recognition sites added to its 5′-end and/or 3′-end.

[0400] Such functional alterations of a given nucleic acid sequence afford an opportunity to promote secretion and/or processing of heterologous proteins encoded by foreign nucleic acid sequences fused thereto. All variations of the nucleotide sequence of the kinase genes of the invention and fragments thereof permitted by the genetic code are, therefore, included in this invention.

[0401] Further, it is possible to delete codons or to substitute one or more codons with codons other than degenerate codons to produce a structurally modified polypeptide, but one which has substantially the same utility or activity as the polypeptide produced by the unmodified nucleic acid molecule. As recognized in the art, the two polypeptides are functionally equivalent, as are the two nucleic acid molecules that give rise to their production, even though the differences between the nucleic acid molecules are not related to the degeneracy of the genetic code.

[0402] A “chemical derivative” of the complex contains additional chemical moieties not normally a part of the protein. Covalent modifications of the protein or peptides are included within the scope of this invention. Such modifications may be introduced into the molecule by reacting targeted amino acid residues of the peptide with an organic derivatizing agent that is capable of reacting with selected side chains or terminal residues, as described below.

[0403] Cysteinyl residues most commonly are reacted with alpha-haloacetates (and corresponding amines), such as chloroacetic acid or chloroacetamide, to give carboxymethyl or carboxyamidomethyl derivatives. Cysteinyl residues also are derivatized by reaction with bromotrifluoroacetone, chloroacetyl phosphate, N-alkylmaleimides, 3-nitro-2-pyridyl disulfide, methyl 2-pyridyl disulfide, p-chloromercuribenzoate, 2-chloromercuri-4-nitrophenol, or chloro-7-nitrobenzo-2-oxa-1,3-diazole.

[0404] Histidyl residues are derivatized by reaction with diethylprocarbonate at pH 5.5-7.0 because this agent is relatively specific for the histidyl side chain. Para-bromophenacyl bromide also is useful; the reaction is preferably performed in 0.1 M sodium cacodylate at pH 6.0.

[0405] Lysinyl and amino terminal residues are reacted with succinic or other carboxylic acid anhydrides. Derivatization with these agents has the effect or reversing the charge of the lysinyl residues. Other suitable reagents for derivatizing primary amine containing residues include imidoesters such as methyl picolinimidate; pyridoxal phosphate; pyridoxal; chloroborohydride; trinitrobenzenesulfonic acid; O-methylisourea; 2,4 pentanedione; and transaminase-catalyzed reaction with glyoxylate.

[0406] Arginyl residues are modified by reaction with one or several conventional reagents, among them phenylglyoxal, 2,3-butanedione, 1,2-cyclohexanedione, and ninhydrin. Derivatization of arginine residues requires that the reaction be performed in alkaline conditions because of the high pKₐ of the guanidine functional group. Furthermore, these reagents may react with the groups of lysine as well as the arginine alpha-amino group.

[0407] Tyrosyl residues are well-known targets of modification for introduction of spectral labels by reaction with aromatic diazonium compounds or tetranitromethane. Most commonly, N-acetylimidizol and tetranitromethane are used to form O-acetyl tyrosyl species and 3-nitro derivatives, respectively.

[0408] Carboxyl side groups (aspartyl or glutamyl) are selectively modified by reaction with carbodiimide (R′—N—C—N—R′) such as 1-cyclohexyl-3-(2-morpholinyl(4-ethyl) carbodiimide or 1-ethyl-3-(4-azonia-4,4-dimethylpentyl) carbodiimide. Furthermore, aspartyl and glutamyl residues are converted to asparaginyl and glutaminyl residues by reaction with ammonium ions.

[0409] Glutaminyl and asparaginyl residues are frequently deamidated to the corresponding glutamyl and aspartyl residues. Alternatively, these residues are deamidated under mildly acidic conditions. Either form of these residues falls within the scope of this invention.

[0410] Derivatization with bifunctional agents is useful, for example, for cross-linking the component peptides of the protein to each other or to other proteins in a complex to a water-insoluble support matrix or to other macromolecular carriers. Commonly used cross-linking agents include, for example, 1,1-bis(diazoacetyl)-2-phenylethane, glutaraldehyde, N-hydroxysuccinimide esters, for example, esters with 4-azidosalicylic acid, homobifunctional imidoesters, including disuccinimidyl esters such as 3,3′-dithiobis(succinimidylpropionate), and bifunctional maleimides such as bis-N-maleimido-1,8-octane. Derivatizing agents such as methyl-3-[p-azidophenyl)dithio]propioimidate yield photoactivatable intermediates that are capable of forming crosslinks in the presence of light. Alternatively, reactive water-insoluble matrices such as cyanogen bromide-activated carbohydrates and the reactive substrates described in U.S. Pat. Nos. 3,969,287; 3,691,016; 4,195,128; 4,247,642; 4,229,537; and 4,330,440 are employed for protein immobilization.

[0411] Other modifications include hydroxylation of proline and lysine, phosphorylation of hydroxyl groups of seryl or threonyl residues, methylation of the alpha-amino groups of lysine, arginine, and histidine side chains (Creighton, T. E., Proteins: Structure and Molecular Properties, W.H. Freeman & Co., San Francisco, pp. 79-86 (1983)), acetylation of the N-terminal amine, and, in some instances, amidation of the C-terminal carboxyl groups.

[0412] Such derivatized moieties may improve the stability, solubility, absorption, biological half life, and the like. The moieties may alternatively eliminate or attenuate any undesirable side effect of the protein complex and the like. Moieties capable of mediating such effects are disclosed, for example, in Remington's Pharmaceutical Sciences, 18th ed., Mack Publishing Co., Easton, Pa. (1990).

[0413] The term “fragment” is used to indicate a polypeptide derived from the amino acid sequence of the proteins, of the complexes having a length less than the full-length polypeptide from which it has been derived. Such a fragment may, for example, be produced by proteolytic cleavage of the full-length protein. Preferably, the fragment is obtained recombinantly by appropriately modifying the DNA sequence encoding the proteins to delete one or more amino acids at one or more sites of the C-terminus, N-terminus, and/or within the native sequence. Fragments of a protein are useful for screening for substances that act to modulate signal transduction, as described herein. It is understood that such fragments may retain one or more characterizing portions of the native complex. Examples of such retained characteristics include: catalytic activity; substrate specificity; interaction with other molecules in the intact cell; regulatory functions; or binding with an antibody specific for the native complex, or an epitope thereof.

[0414] Another functional derivative intended to be within the scope of the present invention is a “variant” polypeptide which either lacks one or more amino acids or contains additional or substituted amino acids relative to the native polypeptide. The variant may be derived from a naturally occurring complex component by appropriately modifying the protein DNA coding sequence to add, remove, and/or to modify codons for one or more amino acids at one or more sites of the C-terminus, N-terminus, and/or within the native sequence. It is understood that such variants having added, substituted and/or additional amino acids retain one or more characterizing portions of the native protein, as described above.

[0415] A functional derivative of a protein with deleted, inserted and/or substituted amino acid residues may be prepared using standard techniques well-known to those of ordinary skill in the art. For example, the modified components of the functional derivatives may be produced using site-directed mutagenesis techniques (as exemplified by Adelman et al., 1983, DNA 2: 183) wherein nucleotides in the DNA coding the sequence are modified such that a modified coding sequence is modified, and thereafter expressing this recombinant DNA in a prokaryotic or eukaryotic host cell, using techniques such as those described above. Alternatively, proteins with amino acid deletions, insertions and/or substitutions may be conveniently prepared by direct chemical synthesis, using methods well-known in the art. The functional derivatives of the proteins typically exhibit the same qualitative biological activity as the native proteins.

### Tables and Description Thereof

[0416] This patent application describes 66 protein kinase polypeptides identified in genomic and cDNA sequence databases. The results are summarized in six tables, described below. The Tables appear beginning at page 233.

[0417] Table 1 documents the name of each gene, the nucleic acid and amino acid sequence identification numbers, the species (human or mouse), the classifications of each gene (superfamily, family and group), the lengths of the nucleic acid and protein sequences, the positions and lengths of the open reading frames within the sequence, and whether Sugen has cloned a full length version of the gene. From left to right the data presented is as follows: Gene name, Species, ID#na, SEQ ID NO:, Superfamily, Group, Family, NA_length, AA_length, ORF Start, ORF End, ORF Length, Physical Status (FL indicates a full-length cDNA version of the gene has been obtained). “Gene name” refers to name given the sequence encoding the kinase or kinase-like enzyme. The “ID#na” and “ID#aa” refer to the SEQ ID NOS given each nucleic acid and amino acid sequence in this patent. “Superfamily” identifies whether the gene is a protein kinase or protein-kinase-like. “Group” and “Family” refer to the protein kinase classification defined by sequence homology and based on previously established phylogenetic analysis [Hardie, G. and Hanks S. The Protein Kinase Book, Academic Press (1995) and Hunter T. and Plowman, G. Trends in Biochemical Sciences (1977) 22: 18-22 and Plowman G. D. et al. (1999) Proc. Natl. Acad. Sci. 96: 13603-13610)]. “NA_length” refers to the length in nucleotides of the corresponding nucleic acid sequence. “AA length” refers to the length in amino acids of the peptide encoded in the corresponding nuclei acid sequence. “ORF start” refers to the beginning nucleotide of the open reading frame. “ORF end” refers to the last nucleotide of the open reading frame, excluding the stop codon. “ORF length” refers to the length in nucleotides of the open reading frame (including the stop codon). In the “Physical Status” column, “FL” indicates a full-length cDNA version of the gene has been obtained.

[0418] Table 2 describes the results of Smith Waterman similarity searches (Matrix: Pam100; gap open/extension penalties 12/2) of the amino acid sequences against the NCBI database of non-redundant protein sequences (http://www.ncbi.nlm.nih.gov/Entrez/protein.html). It is broken into two sections, Tables 2a and 2b. For Table 2a: from left to right the data presented is as follows: Gene_NAME, Species, ID#na, ID#aa, Super-family, Group, Family, AA length, PSCORE, MATCHES, % Identity, % Similarity, ACCESSION, and DESCRIPTION. The first columns (Gene NAME, Species, ID#na, ID#aa, Super-family, Group, Family, AA length) are the same as in Table 1. “PSCORE” refers to the Smith Waterman probability score. This number approximates the chance that the alignment occurred by chance. Thus, a very low number, such as 2.10E-64, indicates that there is a very significant match between the query and the database target. “Matches” indicates the number of amino acids that were identical in the alignment. “% Identity” lists the percent of amino acids that were identical over the alignment. “% Similarity” lists the percent of amino acids that were similar over the alignment. ACCESSION refers to the accession number of the most similar protein in the NCBI database of non-redundant proteins. “Description” contains the name and species of origin of the most similar protein in the NCBI database of non-redundant proteins. Table 2b continues the tabulation of the Smith Waterman results. The headings are: Gene_NAME, Species, ID#na, ID#aa, Super-family, Group, Family, QUERYSTART, QUERYEND, TARGETSTART, TARGETEND, % QUERY, % TARGET. The “QUERY” is the patent sequence, and the “TARGET” is the best hit within the NCBI protein database. “QUERYSTART” refers to the amino acid number at which the Query (the patent protein sequence) begins to align with the TARGET (database) sequence. “QUERYEND” refers to the amino acid position within the patent protein sequence (the QUERY) at which the alignment with the database protein (the TARGET) ends. “TARGETSTART” refers to the amino acid position of the database protein (the TARGET) at which the alignment with the patent sequence (the QUERY) begins. “TARGETEND” refers to the amino acid position within the database sequence (the TARGET) at which alignment with the QUERY ends. % QUERY gives the percent of the patent amino acid sequence which is aligned with the database hit (the TARGET). % TARGET gives the percent of the database hit which aligns with the patent sequence.

[0419] Table 3 lists the results of searching the database of single nucleotide polymorphisms (dbSNP) with the patent nucleic acid sequences. The column headings are: Gene, ID#na, ID#aa, Nucleotide #, Polymorphism, Nucleotide in patent sequence, AA Residue #, Silent/Residue Change, AA Residue in Patent, Accession#. “Nucleotide #” refers the to the position within the nucleic acid sequence at which the SNP occurs; “Polymorphism” describes the sequence change at the site of the SNP, for example, a change from C to T; “Nucleotide in patent sequence” lists the nucleotide (A,C,G,T) present in the patent sequence; “AA Residue #” refers to the position within the patent protein of the amino acid affected by the SNP (regions outside the coding sequence are referred to as untranslated regions, or UTRs); “Silent/Residue Change” lists the nature of the change in the protein sequence as a consequence of the SNP: silent (for example “no change,” E/A (a glutamic acid in one form is replace by an alanine in the other form), R/stop (a codon for arginine has been altered to a stop codon); “AA Residue in Patent” lists which of the alternative amino acids is present in the patent protein sequence; “Accession#” lists the dbSNP accession number (http://www.ncbi.nlm.nih.gov/SNP/index.html).

[0420] Table 4 describes the extent and the boundaries of the kinase catalytic domains, and other protein domains. These domains were identified using PFAM (http://pfam.wustl.edu/hmmsearch.shtml) models, a large collection of multiple sequence alignments and hidden Markov models covering many common protein domains. Version Pfam 7.3 (May 2002) contains alignments and models for 3849 protein families. The PFAM alignments were downloaded from http://pfam.wustl.edu/hmmsearch.shtml and the HMMr searches were run locally on a Timelogic computer (TimeLogic Corporation, Incline Village, Nev.). The column headings are: “Gene,” “ID#na,” “ID#aa,” “Profile Description,” “Profile Accession,”“Pscore,” “Domain Start,” “Domain End,” “Profile Start,” “Profile End,” “Profile Length,” and “Query Length.” The “Profile Description” column contains the name of the protein domain; “Profile Accession” refers to the PFAM accession number for the domain; “Pscore” lists the probability score, or E-value, and is the number of hits that would be expected to have a score equal or better by chance alone. A good E-value is much less than 1. Around 1 is what is expected just by chance; “Domain Start” lists the amino acid number within the protein sequence at which the domain begins; “Domain End” lists the amino acid number within the protein sequence at which the domain ends; “Profile Start” refers to the position within the profile at which it begins alignment with the patent sequence; “Profile End” lists the position within the profile at which it the alignment with the patent sequence ends; “Profile Length” lists the length in amino acid residues of the PFAM profile; and “Query Length” lists the amino acid length of the patent protein.

[0421] Table 5 lists the chromosomal position of the patent genes. The cytogenetic localization of the kinase genes allows one to compare their map position with databases of “disease loci,” such as the “Online Mendelian Inheritance in Man” (http://www.ncbi.nlm.nih.gov/Omim/searchomim.html). This database is a catalog of human genes and genetic disorders maintained at the National Center for Biotechnology Information. The database contains textual information, pictures, and reference information. The column headings for table 5 are: “Gene Name,” “Species,” “ID#na,” “ID#aa,” “Cytogenetic position,” “Cancer Amplicon,” and “Disease Loci.” “Cytogenetic position” lists the cytogenetic band to which the gene has been mapped, “Cancer Amplicon” annotates the observation that the kinase maps to a known cancer amplicon; and “Disease Loci” annotates the observation that the kinase maps to a region implicated in human disease and documented in OMIM.

[0422] Table 6 lists human ESTs representing the patent genes. The column headings are: “RANK” (number of ESTs per gene, 1-10 for most; SGK110 and SGK069 were not represented in dbEST database); “Gene” (Gene name and ID numbers); “Human EST” (derived from BLASTN search of http://www.ncbi.nlm.nih.gov/dbEST/index.html).

### EXAMPLES

[0423] The examples below are not limiting and are merely representative of various aspects and features of the present invention. The examples below demonstrate the isolation and characterization of the nucleic acid molecules according to the invention, as well as the polypeptides they encode.

### Example 1

### Identification and Characterization of Genomic Fragments Encoding Protein Kinases

[0424] Novel kinases were identified from the Celera human genomic sequence databases, and from the public Human Genome Sequencing project (http://www.ncbi.nlm.nih.gov/) using a hidden Markov model (HMMR) built with 70 mammalian and yeast kinase catalytic domain sequences. These sequences were chosen from a comprehensive collection of kinases such that no two sequences had more than 50% sequence identity. The genomic database entries were translated in six open reading frames and searched against the model using a Timelogic Decypher box with a Field programmable array (FPGA) accelerated version of HMMR2.1. The DNA sequences encoding the predicted protein sequences aligning to the HMMR profile were extracted from the original genomic database. The nucleic acid sequences were then clustered using the Pangea Clustering tool to eliminated repetitive entries. The putative protein kinase sequences were then sequentially run through a series of queries and filters to identify novel protein kinase sequences. Specifically, the HMMR identified sequences were searched using BLASTN and BLASTX against a nucleotide and amino acid repository containing 634 known human protein kinases and all subsequent new protein kinase sequences as they are identified. The output was parsed into a spreadsheet to facilitate elimination of known genes by manual inspection. Two models were developed, a “complete” model and a “partial” or Smith Waterman model. The partial model was used to identify sub-catalytic kinase domains, whereas the complete model was used to identify complete catalytic domains. The selected hits were then queried using BLASTN against the public nrna and EST databases to confirm they are indeed unique. In some cases the novel genes were judged to be homologues of previously identified rodent or vertebrate protein kinases.

[0425] Extension of partial DNA sequences to encompass the full-length open-reading frame was carried out by several methods. Iterative blastn searching of the cDNA databases listed in Table 9 was used to find cDNAs that extended the genomic sequences. “LifeSeqGold” databases are from Incyte Genomics, Inc (http://www.incyte.com/). NCBI databases are from the National Center for Biotechnology Information (http://www.ncbi.nhn.nih.gov/). All blastn searches were conducted using a penalty for a nucleotide mismatch of −3 and reward for a nucleotide match of 1. The gapped blast algorithm is described in: Altschul, Stephen F., Thomas. L. Madden, Alejandro A. Schaffer, Jinghui Zhang, Zheng Zhang, Webb Miller, and David J. Lipman (1997), “Gapped BLAST and PSI-BLAST: a new generation of protein database search programs,” Nucleic Acids Res. 25: 3389-3402).

[0426] Extension of partial DNA sequences to encompass the full-length open-reading frame was also carried out by iterative searches of genomic databases. The first method made use of the Smith-Waterman algorithm to carry out protein-protein searches of a close protein homologue to the partial. The target databases consisted of Genscan and open-reading frame (ORF) predictions of all human genomic sequence derived from the human genome project (HGP) as well as from Celera. The complete set of genomic databases searched is shown in Table 7, below. Genomic sequences encoding potential extensions were further assessed by blastx analysis against the NCBI nonredundant database to confirm the novelty of the hit. The extending genomic sequences were incorporated into the cDNA sequence after removal of potential introns using the Seqman program from DNAStar. The default parameters used for Smith-Waterman searches were as shown next. Matrix: blosum 62; gap-opening penalty: 12; gap extension penalty: 2. Genscan predictions were made using the Genscan program as detailed in Chris Burge and Sam Karlin “Prediction of Complete Gene Structures in Human Genomic DNA,” JMB (1997) 268(1): 78-94). ORF predictions from genomic DNA were made using a standard 6-frame translation.

[0427] Another method for defining DNA extensions from genomic sequence used iterative searches of genomic databases through the Genscan program to predict exon splicing. These predicted genes were then assessed to see if they represented “real” extensions of the partial genes based on homology to related kinases.

[0428] Another method involved using the Genewise program (http://www.sanger.ac.uk/Software/Wise2/) to predict potential ORFs based on homology to the closest orthologue/homologue. Genewise requires two inputs, the homologous protein, and genomic DNA containing the gene of interest. The genomic DNA was identified by blastn searches of Celera and Human Genome Project databases. The orthologs were identified by blastp searches of the NCBI non-redundant protein database (NRAA). Genewise compares the protein sequence to a genomic DNA sequence, allowing for introns and frameshifting errors.

TABLE 7
Databases used for cDNA-based sequence extensions

| Database | Database Date |
|---|---|
| LifeGold templates | March 2002 |
| LifeGold compseqs | March 2002 |
| LifeGold fl | March 2002 |
| LifeGold flft | March 2002 |
| NCBI human Ests | March 2001 |
| NCBI murine Ests | March 2002 |
| NCBI nonredundant | March 2002 |

[0429] TABLE 8
Databases used for genomic-based sequence extensions

| | Number of | Database |
|---|---|---|
| Database | entries | Date |
| Celera Assembly 6 | 479,986 | March 2002 |
| HGP Chromosomal assemblies | 2759 | March 2002 |

Results:

[0430] For genes that were extended using Genewise, the accession numbers of the protein ortholog and the genomic DNA are given. (Genewise uses the ortholog to assemble the coding sequence of the target gene from the genomic sequence). The amino acid sequences for the orthologs were obtained from the NCBI non-redundant database of proteins (http://www.ncbi.nlm.nih.gov/Entrez/protein.html). The genomic DNA came from two sources: Celera and HGP (human genome project), as indicated below. cDNA sources are also listed below. All of the genomic sequences were used as input for Genscan predictions to predict splice sites [Burge and Karlin, J M B (1997) 268(1): 78-94)]. Abbreviations: HGP: Human Genome Project; NCBI, National Center for Biotechnology Information.

[0431] The results are detailed in the paragraphs below for each gene.

Results—Nucleic Acid Sequences

[0432] CRIK, SEQ ID NO: 1, SEQ ID NO: 67, is a member of the Protein Kinase-superfamily. It is further classified into the AGC group, and the DMPK family. The nucleic acid sequence is 8656 nucleotides long, and codes for a protein that is 2055 amino acids long. The open reading frame starts at nucleotide number 51 and ends at nucleotide number 6218. The length of the ORF is 6168 nucleotides. The full length cDNA for this gene has been cloned. The gene has been mapped to chromosomal region 12q24.31. The CRIK sequence maps to Celera contig 181000000794572. A mouse homolog (Rho/rac interacting citron kinase gi|3599509) of CRIK is 353 AAs longer at the N terminus than the public CRIK. Rho/rac interacting citron kinase from mouse (gi|3599509) was used as a model for a genewise prediction. Incyte template, 233643.1, and Incyte CB1 sequence, 7484498CB1, were used to extend the C-terminus of the genewise prediction. Two additional public ESTs (gi|4534019 and gi|3753446) support a different 3′ end. These two public ESTs (gi|4534019 and gi|3753446) have an earlier polyA site, just after ATTCTTAATAGATTTGAATAGCGACGTA (just following the run of T's), this generates an alternative 3′ end in that form.

[0433] DMPK2, SEQ ID NO: 2, SEQ ID NO: 68, is a member of the Protein Kinase superfamily. It is further classified into the AGC group, and the DMPK family. The nucleic acid sequence is 5438 nucleotides long, and codes for a protein that is 1572 amino acids long. The open reading frame starts at nucleotide number 66 and ends at nucleotide number 4784. The length of the ORF is 4719 nucleotides. The gene has been mapped to chromosomal region 11q12-q13.1. This region has been identified as a cancer amplicon (Knuutila, et al). This region has been associated with susceptibility to osteoarthritis (OMIM 165720).

[0434] DMPK2 maps to Celera assembly 5 contig 92000004065166. A genewise prediction was run with this contig and myotonic dystrophy associated protein kinase from rat (gi|7446379) as the model. The rat sequence is 118 AA longer at the N-term and 1200 AA longer at the C-term.

[0435] MAST3, SEQ ID NO: 3, SEQ ID NO: 69, is a member of the Protein Kinase superfamily. It is further classified into the AGC group, and the MAST family. The nucleic-acid sequence is 5990 nucleotides long, and codes for a protein that is 1332 amino acids long. The open reading frame starts at nucleotide number 36 and ends at nucleotide number 4031. The length of the ORF is 3996 nucleotides. The gene has been mapped to chromosomal region 19p13.1.

[0436] The current MAST3 sequence adds a novel N-terminus of 46 AA to sequences previously published. This region is predicted to be of functional importance due to the high level of similarity seen in an orthologous mouse EST (gi|6631994).

[0437] MAST205, SEQ ID NO: 4, SEQ ID NO: 70, is a member of the Protein Kinase superfamily. It is further classified into the AGC group, and the MAST family. The nucleic acid sequence is 5516 nucleotides long, and codes for a protein that is 1798 amino acids long. The open reading frame starts at nucleotide number 1 and ends at nucleotide number 5397. The length of the ORF is 5397 nucleotides. The gene has been mapped to chromosomal region 1p34.1. The public MAST205 sequence is partial at the N and C-terminus. The MAST205 sequence maps to Celera assembly 5 contig 92000004111345. The mouse homolog microtubule-associated testis specific S/T protein kinase (gi|6678958) was used as a model for a genewise prediction.

[0438] MASTL, SEQ ID NO: 5, SEQ ID NO: 71, is a member of the Protein Kinase superfamily. It is further classified into the AGC group, and the MAST family. The nucleic acid sequence is 3882 nucleotides long, and codes for a protein that is 878 amino acids long. The open reading frame starts at nucleotide number 967 and ends at nucleotide number 3603. The length of the ORF is 2637 nucleotides. The full length cDNA for this gene has been cloned. The gene has been mapped to chromosomal region 10p11.2-p12.1. This region has been associated with susceptibility to schizophrenia (OMIM 181500).

[0439] PKC_eta, SEQ ID NO: 6, SEQ ID NO: 72, is a member of the Protein Kinase superfamily. It is further classified into the AGC group, and the PKC family. The nucleic acid sequence is 2392 nucleotides long, and codes for a protein that is 683 amino acids long. The open reading frame starts at nucleotide number 407 and ends at nucleotide number 2458. The length of the ORF is 2052 nucleotides. The full length cDNA for this gene has been cloned. The gene has been mapped to chromosomal region 14q23.1.

[0440] H19102, SEQ ID NO: 7, SEQ ID NO: 73, is a member of the Protein Kinase superfamily. It is further classified into the AGC group, and the RSK family. The nucleic acid sequence is 1564 nucleotides long, and codes for a protein that is 449 amino acids long. The open reading frame starts at nucleotide number 188 and ends at nucleotide number 1537. The length of the ORF is 1350 nucleotides. The gene has been mapped to chromosomal region 17q 11.1. This region has been identified as a cancer amplicon (Knuutila, et al).

[0441] Genewise predictions with the nearest homologs (bicoid-interacting protein in fly and a C. elegans predicted protein) as models yielded some downstream sequence, extending the kinase domain.

[0442] MSK1, SEQ ID NO: 8, SEQ ID NO: 74, is a member of the Protein Kinase superfamily. It is further classified into the AGC group, and the RSK family. The nucleic acid sequence is 3813 nucleotides long, and codes for a protein that is 802 amino acids long. The open reading frame starts at nucleotide number 159 and ends at nucleotide number 2567. The length of the ORF is 2409 nucleotides. The full length cDNA for this gene has been cloned. The gene has been mapped to chromosomal region 14q32.11.

[0443] YANK3, SEQ ID NO: 9, SEQ ID NO: 75, is a member of the Protein Kinase superfamily. It is further classified into the AGC group, and the YANK family. The nucleic acid sequence is 2051 nucleotides long, and codes for a protein that is 486 amino acids long. The open reading frame starts at nucleotide number 70 and ends at nucleotide number 1530. The length of the ORF is 1461 nucleotides. The full length cDNA for this gene has been cloned. The gene has been mapped to chromosomal region 10q26.3.

[0444] MARK2, SEQ ID NO: 10, SEQ ID NO: 76, is a member of the Protein Kinase superfamily. It is further classified into the CAMK group, and the CAMKL family. The nucleic acid sequence is 3063 nucleotides long, and codes for a protein that is 787 amino acids long. The open reading frame starts at nucleotide number 399 and ends at nucleotide number 2762. The length of the ORF is 2364 nucleotides. The gene has been mapped to chromosomal region 11q12-11q13. This region has been identified as a cancer amplicon (Knuutila, et al). This region has been associated with susceptibility to osteoarthritis (OMIM 165720).

[0445] The current sequence extends the N-terminus of published sequences by 33 AA. The mouse ortholog (gi|6679643) is identical in these 33 AA, which implies that this terminal region is important for full biological function of the protein and has been highly conserved to preserve that function.

[0446] NuaK2, SEQ ID NO: 11, SEQ ID NO: 77, is a member of the Protein Kinase superfamily. It is further classified into the CAMK group, and the CAMKL family. The nucleic acid sequence is 3463 nucleotides long, and codes for a protein that is 672 amino acids long. The open reading frame starts at nucleotide number 57 and ends at nucleotide number 2075. The length of the ORF is 2019 nucleotides. The full length cDNA for this gene has been cloned. The gene has been mapped to chromosomal region 1q31-q32.1.

[0447] BRSK2, SEQ ID NO: 12, SEQ ID NO: 78, is a member of the Protein Kinase superfamily. It is further classified into the CAMK group, and the CAMKL family. The nucleic acid sequence is 3831 nucleotides long, and codes for a protein that is 674 amino acids long. The open reading frame starts at nucleotide number 25 and ends at nucleotide number 2049. The length of the ORF is 2025 nucleotides. The gene has been mapped to chromosomal region 11p15.5.

[0448] MARK4, SEQ ID NO: 13, SEQ ID NO: 79, is a member of the Protein Kinase superfamily. It is further classified into the CAMK group, and the CAMKL family. The nucleic acid sequence is 3249 nucleotides long, and codes for a protein that is 752 amino acids long. The open reading frame starts at nucleotide number 17 and ends at nucleotide number 2275. The length of the ORF is 2259 nucleotides. The gene has been mapped to chromosomal region 19q13.2-q13.33. This region has been identified as a cancer amplicon (Knuutila, et al).

[0449] DCAMKL2, SEQ ID NO: 14, SEQ ID NO: 80, is a member of the Protein Kinase superfamily. It is further classified into the CAMK group, and the DCAMKL family. The nucleic acid sequence is 2827 nucleotides long, and codes for a protein that is 766 amino acids long. The open reading frame starts at nucleotide number 350 and ends at nucleotide number 2650. The length of the ORF is 2301 nucleotides. The full length cDNA for this gene has been cloned. The gene has been mapped to chromosomal region 4q31.3.

[0450] PIM2, SEQ ID NO: 15, SEQ ID NO: 81, is a member of the Protein Kinase superfamily. It is further classified into the CAMK group, and the PIM family. The nucleic acid sequence is 2186 nucleotides long, and codes for a protein that is 435 amino acids long. The open reading frame starts at nucleotide number 1 and ends at nucleotide number 1305. The length of the ORF is 1305 nucleotides. The gene has been mapped to chromosomal region Xp11.23. This region has been identified as a cancer amplicon (Knuutila, et al).

[0451] Based on other family members, and rodent orthologs it has been determined that the PIM2 protein starts with an atypical CTG initiation codon, making the first AA an L rather than an M.

[0452] PIM3, SEQ ID NO: 16, SEQ ID NO: 82, is a member of the Protein Kinase superfamily. It is further classified into the CAMK group, and the PIM family. The nucleic acid sequence is 2405 nucleotides long, and codes for a protein that is 326 amino acids long. The open reading frame starts at nucleotide number 436 and ends at nucleotide number 1416. The length of the ORF is 981 nucleotides. Sugen has cloned the full length cDNA for this gene. The gene has been mapped to chromosomal region 22q 13.

[0453] TSSK4, SEQ ID NO: 17, SEQ ID NO: 83, is a member of the Protein Kinase superfamily. It is further classified into the CAMK group, and the TSSK family. The nucleic acid sequence is 1710 nucleotides long, and codes for a protein, that is 328 amino acids long. The open reading frame starts at nucleotide number 617 and ends at nucleotide number 1603. The length of the ORF is 987 nucleotides. The full length cDNA for this gene has been cloned. The gene has been mapped to chromosomal region 14q 11.1.

[0454] The ORF was also extended by documenting an alternative splice variant (7693857.2) which shortened the 5′ end of exon 4 by 72 nucleotides (splicing out an inframe stop codon): >72 alternatively spliced nucleotides GTCCAACTGCTCATTGCCTGTGTGGCACAATGGAGAAAAACTCAGGCAAG ACCTCTCTCTCCCCTGCTCTAG. Canonical splice sites are maintained with both splice variants. The sequence now shares tight similarity to a mouse cDNA from RIKEN (gi|12855865) over its full length.

[0455] CKIL2, SEQ ID NO: 18, SEQ ID NO: 84, is a member of the Protein Kinase superfamily. It is further classified into the CK1 group, and the CKIL family. The nucleic acid sequence is 5946 nucleotides long, and codes for a protein that is 1244 amino acids long. The open reading frame starts at nucleotide number 368 and ends at nucleotide number 4102. The length of the ORF is 3735 nucleotides. The full length cDNA for this gene has been cloned. The gene has been mapped to chromosomal region 15q14-q15.3. This region has been associated with susceptibility to schizophrenia-(OMIM 181500).\

[0456] PCTAIRE3, SEQ ID NO: 19, SEQ ID NO: 85, is a member of the Protein Kinase superfamily. It is further classified into the CMGC group, and the CDK family. The nucleic acid sequence is 3229 nucleotides long, and codes for a protein that is 505 amino acids long. The open reading frame starts at nucleotide number 303 and ends at nucleotide number 1817. The length of the ORF is 1515 nucleotides. The full length cDNA for this gene has been cloned. The gene has been mapped to chromosomal region 1q32.

[0457] PFTAIRE2, SEQ ID NO: 20, SEQ ID NO: 86, is a member of the Protein Kinase superfamily. It is further classified into the CMGC group, and the CDK family. The nucleic acid sequence is 2250 nucleotides long, and codes for a protein that is 435 amino acids long. The open reading frame starts at nucleotide number 45 and ends at nucleotide number 1352. The length of the ORF is 1308 nucleotides. The full length cDNA for this gene has been cloned. The gene has been mapped to chromosomal region 2q33.2-q34. This region has been identified as a cancer amplicon (Knuutila, et al). This region has been associated with susceptibility to osteoarthritis (OMIM 140600).

[0458] ERK7, SEQ ID NO: 21, SEQ ID NO: 87, is a member of the Protein Kinase superfamily. It is further classified into the CMGC group, and the MAPK family. The nucleic acid sequence is 1906 nucleotides long, and codes for a protein that is 563 amino acids long. The open reading frame starts at nucleotide number 19 and ends at nucleotide number 1710. The length of the ORF is 1692 nucleotides. The full length cDNA for this gene has been cloned. The gene has been mapped to chromosomal region 8q24.3. A genewise prediction was run with a rat homolog, extracellular signal-regulated kinase 7 (gi|4220888), as the model. Two splice variants were noted for ERK7: >Nucleotides 967-1098 are alternatively spliced GCACTGCAGCACCCCTACGTGCAGAGGTTCCACTGCCCCAGCGACGAGTG GGCACGAGAGGCAGATGTGCGGCCCCGGGCACACGAAGGGGTCCAGCTC TCTGTGCCTGAGTACCGCAGCCGCGTCTATCAG. >Nucleotides 184-240 are alternatively spliced GACATGGGCTTCCTTCTTGCTCCACCCACCCACACACCTGTGTTTCTGTCTC TTCAG.

[0459] CKIIa-rs, SEQ ID NO: 22, SEQ ID NO: 88, is a member of the Protein Kinase superfamily. It is further classified into the Other group, and the CKII family. The nucleic acid sequence is 1494 nucleotides long, and codes for a protein that is 391 amino acids long. The open reading frame starts at nucleotide number 150 and ends at nucleotide number 1325. The length of the ORF is 1176 nucleotides. The gene has been mapped to chromosomal region 11p15.

[0460] DYRK4, SEQ ID NO: 23, SEQ ID NO: 89, is a member of the Protein Kinase superfamily. It is further classified into the CMCG group, and the DYRK family. The nucleic acid sequence is 2886 nucleotides long, and codes for a protein that is 921 amino acids long. The open reading frame starts at nucleotide number 1 and ends at nucleotide number 2766. The length of the ORF is 2766 nucleotides. The full length cDNA for this gene was cloned. The gene has been mapped to chromosomal region 12p13. This region has been associated with susceptibility to essential hypertension (OMIM 145500).

[0461] HIPK1, SEQ ID NO: 24, SEQ ID NO: 90, is a member of the Protein Kinase superfamily. It is further classified into the CMGC group, and the DYRK family. The nucleic acid sequence is 8212 nucleotides long, and codes for a protein that is 1210 amino acids long. The open reading frame starts at nucleotide number 286 and ends at nucleotide number 3918. The length of the ORF is 3633 nucleotides. The full length cDNA for this gene has been cloned. The gene has been mapped to chromosomal region 1p11-p12. Contigs from Celera and HGP with homeoedomain interacting protein kinase 1 from mouse were used for genewise predictions.

[0462] HIPK4, SEQ ID NO: 25, SEQ ID NO: 91, is a member of the Protein Kinase superfamily. It is further classified into the CMGC group, and the DYRK family. The nucleic acid sequence is 3142 nucleotides long, and codes for a protein that is 616 amino acids long. The open reading frame starts at nucleotide number 977 and ends at nucleotide number 2827. The length of the ORF is 1851 nucleotides. The full length cDNA for this gene has been cloned. The gene has been mapped to chromosomal region 19q13.1. This region has been identified as a cancer amplicon (Knuutila, et al).

[0463] BIKE, SEQ ID NO: 26, SEQ ID NO: 92, is a member of the Protein Kinase superfamily. It is further classified into the Other group, and the NAK family. The nucleic acid sequence is 3895 nucleotides long, and codes for a protein that is 1161 amino acids long. The open reading frame starts at nucleotide number 203 and ends at nucleotide number 3688. The length of the ORF is 3486 nucleotides. The full length cDNA for this gene has been cloned. The gene has been mapped to chromosomal region 4q13-q21.21. This region has been associated with susceptibility to osteoarthritis (OMIM 140600).

[0464] The BIKE sequence is full length, and 89% identical to murine BIKE across the full length of the protein.

[0465] NEK10, SEQ ID NO: 27, SEQ ID NO: 93, is a member of the Protein Kinase superfamily. It is further classified into the Other group, and the NEK family. The nucleic acid sequence is 3912 nucleotides long, and codes for a protein that is 1125 amino acids long. The open reading frame starts at nucleotide number 176 and ends at nucleotide number 3553. The length of the ORF is 3378 nucleotides. The full length cDNA for this gene has been cloned. The gene has been mapped to chromosomal region 3p21.33.

[0466] pNEK5, SEQ ID NO: 28, SEQ ID NO: 94, is a member of the Protein Kinase superfamily. It is further classified into the Other group, and the NEK family. The nucleic acid sequence is 2816 nucleotides long, and codes for a protein that is 889 amino acids long. The open reading frame starts at nucleotide number 147 and ends at nucleotide number 2816. The length of the ORF is 2670 nucleotides. The full length cDNA for this gene has been cloned. The gene has been mapped to chromosomal region 13q14. This region has been identified as a cancer amplicon (Knuutila, et al).

[0467] The current sequence is an extension of our previously filed patent application sequence (gi|14546899, Sequence 45 from Patent WO0138503), incorporated herein by reference, which adds a 57 AA extension to the N terminus, a 127 AA extension to the C-terminus and is alternatively spliced at two regions in the middle of the gene.

[0468] NEK1, SEQ ID NO: 29, SEQ ID NO: 95, is a member of the Protein Kinase superfamily. It is further classified into the Other group, and the NEK family. The nucleic acid sequence is 5583 nucleotides long, and codes for a protein that is 1286 amino acids long. The open reading frame starts at nucleotide number 493 and ends at nucleotide number 4353. The length of the ORF is 3861 nucleotides. The gene has been mapped to chromosomal region 4q33-q34.

[0469] The revised sequence now contains a complete kinase domain and overlaps completely with the mouse ortholog of Nek1 (gi|1709251). Three alternative splice variants were noted: >Nucleotides 243-320 (canonical splice sites maintained) gtgtggagagtctcagtgccccctttcagtctggactgtgagctgctgctggttagacagtcttggtttctctttcag. >Nucleotides 1923-2054 (canonical splice sites maintained) AGGAATTCTGCCTGGAGTTCGTCCAGGATTTCCTTATGGGGCTGCAGGTCA TCACCATTCCTGATGCTGATGATATTAGAAAAACTTTGAAAAGATTGAA GGCGGTGTCTAAACAAGCCAATGCAAACAG. >Nucleotides 2158-2241 (canonical splice sites maintained). GGAATCCTGCAAAACCTGGCAGCTATGTATGGAGGCAGGCCCAGCTCTTC AAGAGGAGGGAAGCCAAGAAACAAAGAGGAAGAG.

[0470] NEK3, SEQ ID NO: 30, SEQ ID NO: 96, is a member of the Protein Kinase superfamily. It is further classified into the Other group, and the NEK family. The nucleic acid sequence is 2326 nucleotides long, and codes for a protein that is 506 amino acids long. The open reading frame starts at nucleotide number 296 and ends at nucleotide number 1816. The length of the ORF is 1521 nucleotides. The gene has been mapped to chromosomal region 13q14.3. This region has been identified as a cancer amplicon (Knuutila, et al).

[0471] SGK069, SEQ ID NO: 31, SEQ ID NO: 97, is a member of the Protein Kinase superfamily. It is further classified into the Other group, and the NKF1 family. The nucleic acid sequence is 1156 nucleotides long, and codes for a protein that is 348 amino acids long. The open reading frame starts at nucleotide number 110 and ends at nucleotide number 1156. The length of the ORF is 1047 nucleotides. The full length cDNA for this gene has been cloned. The gene has been mapped to chromosomal region 19q13.43.

[0472] SGK110, SEQ ID NO: 32, SEQ ID NO: 98, is a member of the Protein Kinase superfamily. It is further classified into the Other group, and the NKF1 family. The nucleic acid sequence is 1853 nucleotides long, and codes for a protein that is 414 amino acids long. The open reading frame starts at nucleotide number 299 and ends at nucleotide number 1543. The length of the ORF is 1245 nucleotides. Sugen has cloned the full length cDNA for this gene. The gene has been mapped to chromosomal region 19q13.43.

[0473] NRBP2, SEQ ID NO: 33, SEQ ID NO: 99, is a member of the Protein Kinase superfamily. It is further classified into the Other group, and the NRBP family. The nucleic acid sequence is 3765 nucleotides long, and codes for a protein that is 507 amino acids long. The open reading frame starts at nucleotide number 282 and ends at nucleotide number 1805. The length of the ORF is 1524 nucleotides. The full length cDNA for this gene has been cloned. The gene has been mapped to chromosomal region 8q24.3.

[0474] CNK, SEQ ID NO: 34, SEQ ID NO: 100, is a member of the Protein Kinase superfamily. It is further classified into the Other group, and the PLK family. The nucleic acid sequence is 2535 nucleotides long, and codes for a protein that is 646 amino acids long. The open reading frame starts at nucleotide number 534 and ends at nucleotide number 2474. The length of the ORF is 1941 nucleotides. The gene has been mapped to chromosomal region 1p34.1.

[0475] Two alternative splice variants were noted (Incyte template 222139.15): (1) an intron read through over the intron between exons 9 and 10, (2) exon 6 is alternatively spliced:

>Nucleotides (insert after nucleotide 1697)
GTGAGGCGCTCAGGTGGACACTGTTCCCCTGACTCACCCCCACCCTAGCA
GCTGAGGGAAGCCGGGGATAAAAGAGGCTGCTGAAGCATCCAGCCTCGTG
GTGGCCTAATTGGCTGTGTGTCACCAGCCTGGCGGGGCTGACCTGGGGTG
CCCTGGGAGCCAGGGCAGGGCCAGGCCATGGACTCAAGGGTTTGGATTTT
GGGGCCTGTGTCACTCCCTTTCCCTGCCCAACCCTCCAG
>Nucleotides 2039-2168
GACTGTGCACTACAATCCCACCAGCACAAAGCACTTCTCCTTCTCCGTGG
GTGCTGTGCCCCGGGCCCTGCAGCCTCAGCTGGGTATCCTGCGGTACTTC
GCCTCCTACATGGAGCAGCACCTCATGAAG

[0476] SCYL2, SEQ ID NO: 35, SEQ ID NO: 101, is a member of the Protein Kinase superfamily. It is further classified into the Other group, and the SCY1 family. The nucleic acid sequence is 5525 nucleotides long, and codes for a protein that is 933 amino acids long. The open reading frame starts at nucleotide number 173 and ends at nucleotide number 2974. The length of the ORF is 2802 nucleotides. The gene has been mapped to chromosomal region 12q23-q24.1.

[0477] SRPK2, SEQ ID NO: 36, SEQ ID NO: 102, is a member of the Protein Kinase superfamily. It is further classified into the CMGC group, and the SRPK family. The nucleic acid sequence is 3715-nucleotides long, and codes for a protein that is 688 amino acids long. The open reading frame starts at nucleotide number 179 and ends at nucleotide number 2245. The length of the ORF is 2067 nucleotides. The full length cDNA for this gene has been cloned. The gene has been mapped to chromosomal region 7q22.3. This region has been identified as a cancer amplicon (Knuutila, et al).

[0478] TLK1, SEQ ID NO: 37, SEQ ID NO: 103, is a member of the Protein Kinase superfamily. It is further classified into the Other group, and the TLK family. The nucleic acid sequence is 4321 nucleotides long, and codes for a protein that is 787 amino acids long. The open reading frame starts at nucleotide number 238 and ends at nucleotide number 2601. The length of the ORF is 2364 nucleotides. The gene has been mapped to chromosomal region 2q31.1. This region has been associated with susceptibility to osteoarthritis (OMIM 140600).

[0479] One alternative splice variant was noted:

>Nucleotides 645-707
GTTCCCCAACCTCCCGGTCTTCCAGTCCTTGGCCTATTGGGAAATGGGTC
GTACAGCAGGAGG.

[0480] SGKO71, SEQ ID NO: 38, SEQ ID NO: 104, is a member of the Protein Kinase superfamily. It is further classified into the Other group, and the Unique family. The nucleic acid sequence is 2285 nucleotides long, and codes for a protein that is 632 amino acids long. The open reading frame starts at nucleotide number 195 and ends at nucleotide number 2093. The length of the ORF is 1899 nucleotides. The full length cDNA for this gene has been cloned. The gene has been mapped to chromosomal region 9q34.

[0481] SK516, SEQ ID NO: 39, SEQ ID NO: 105, is a member of the Protein Kinase superfamily. It is further classified into the Other group, and the Unique family. The nucleic acid sequence is 7364 nucleotides long, and codes for a protein that is 929 amino acids long. The open reading frame starts at nucleotide number 180 and ends at nucleotide number 2969. The length of the ORF is 2790 nucleotides. The gene has been mapped to chromosomal region 1q31-32.1.

[0482] H85389, SEQ ID NO: 40, SEQ ID NO: 106, is a member of the Protein Kinase superfamily. It is further classified into the Other group, and the ULK family. The nucleic acid sequence is 1971 nucleotides long, and codes for a protein that is 401 amino acids long. The open reading frame starts at nucleotide number 134 and ends at nucleotide number 1339. The length of the ORF is 1206 nucleotides. The full length cDNA for this gene has been cloned. The gene has been mapped to chromosomal region 20p13.

[0483] Wee1b, SEQ ID. NO: 41, SEQ ID NO: 107, is a member of the Protein Kinase superfamily. It is further classified into the Other group, and the WEE family. The nucleic acid sequence is 1704 nucleotides long, and codes for a protein that is 567 amino acids long. The open reading frame starts at nucleotide number 1 and ends at nucleotide number 1704. The length of the ORF is 1704 nucleotides. The gene has been mapped to chromosomal region 7q34-36.

[0484] Wnk2, SEQ ID NO: 42, SEQ ID NO: 108, is a member of the Protein Kinase superfamily. It is further classified into the Other group, and the Wnk family. The nucleic acid sequence is 7981 nucleotides long, and codes for a protein that is 2245 amino acids long. The open reading frame starts at nucleotide number 67 and ends at nucleotide number 6804. The length of the ORF is 6738 nucleotides. The gene has been mapped to chromosomal region 9q22.31. Other members of this family (Wnk1 and Wnk4) have been strongly implicated in hypertension (Lifton R P, et al., Human hypertension caused by mutations in WNK kinases, Science. 2001 Aug. 10; 293(5532): 1107-12), and so Wnk2 may also play a role in this disease.

[0485] Six alternative splice variants are noted:

>Wnk2, SEQ ID NO: 42 Nucleotides 2059 and 2214
CCTGGCTTGCCGGTGGGCTCTGTCCCGGCCCCCGCCTGCCCTCCGTCCCT
CCAGCAGCACTTCCCGGATCCGGCCATGAGCTTCGCCCCCGTGCTGCCGC
CGCCCAGCACCCCCATGCCCACGGGCCCAGGCCAGCCAGCACCCCCCGGC
CAGCAG
>Wnk2, SEQ ID NO: 42 Nucleotides 5945 and 6136
GTCACTTGGCTGACTCCAGCAGAGGCCCTCCCGCTAAGGACCCTGCCCAA
GCCAGTGTGGGGCTCACTGCAGACAGCACGGGCCTGAGCGGGAAGGCAGT
GCAGACCCAGCAGCCCTGCTCCGTCCGGGCCTCCCTGTCTTCGGACATCT
GCTCCGGCTTAGCCAGTGATGGAGGCGGAGCGCGTGGCCAAG
>Wnk2, SEQ ID NO: 42 Nucleotides 6137 and 6280
GCTGGACGGTTTACCACCCAACGTCTGAGAGAGTGACCTATAAGTCTAGT
AGCAAACCTCGTGCTCGATTCCTCAGTGGACCCGTATCTGTGTCCATCTG
GTCTGCCCTGAAGCGTCTCTGCCTAGGCAAAGAACACAGCAGTA
>Wnk2, SEQ ID NO: 42 Nucleotides 5945 and 6280
GTCACTTGGCTGACTCCAGCAGAGGCCCTCCCGCTAAGGACCCTGCCCAA
GCCAGTGTGGGGCTCACTGCAGACAGCACGGGCCTGAGCGGGAAGGCAGT
GCAGACCCAGCAGCCCTGCTCCGTCCGGGCCTCCCTGTCTTCGGACATCT
GCTCCGGCTTAGCCAGTGATGGAGGCGGAGCGCGTGGCCAAGGCTGGACG
GTTTACCACCCAACGTCTGAGAGAGTGACCTATAAGTCTAGTAGCAAACC
TCGTGCTCGATTCCTCAGTGGACCCGTATCTGTGTCCATCTGGTCTGCCC
TGAAGCGTCTCTGCCTAGGCAAAGAACACAGCAGTA
>Wnk2, SEQ ID NO: 42 Insert after nucleotide 620
TCTGTGCGGTTGACTCCTTTTCCTCCCCGCCTGGAGATCCCCGTGGTGTC
GACTGGAAGCATGGAGGCACCTTGGGGAG
>Wnk2, SEQ ID NO: 42 Replaces nucleotides
6650-7981
ATCCTGAGAGTGAGAAGCCTGACTGACCCCGCCTAGACGCCAGGCCCACT
TCACGCCGTCTAAGTGGAGAAGTGACGGACCCTCAGGGCCAGCTGCTCCT
CCTGTCCAGTTCACGCTGTTTTGTAACCACTTTCTAAGCATTTTTTATTC
ACAATTGGAAACACAAATGTAATGCAAGAATAAAAAATATTTTGGGGCAG
AAAGGACTTTGGTTTTTCAAACTATTTCCTCTCTGGTGGCCCTCGGCCAG
CCAGGTGACTGGGATGTGACAGGGGTGGGGGGACATTCCCAGGACCCTGG
CATGCTCAGGATAGCCCTGTTCTCTGCAGGGCCCTGGAGGTGGCGGCCCC
GGGGAGGCTGATCTCCAAGTCCCCCCGATGCCAGCTGGC

[0486] MAP3K1, SEQ ID NO: 43, SEQ ID NO: 109, is a member of the Protein Kinase superfamily. It is further classified into the STE group, and the STE11 family. The nucleic acid sequence is 7026 nucleotides long, and codes for a protein that is 1511 amino acids long. The open reading frame starts at nucleotide number 1 and ends at nucleotide number 4536. The length of the ORF is 4536 nucleotides. The gene has been mapped to chromosomal region 5q11.2-q13. This region has been associated with susceptibility to schizophrenia (OMIM 181500).

[0487] The sequence has good similarity to the mouse and rat orthologs.

[0488] MAP3K8, SEQ ID NO: 44, SEQ ID NO: 110, is a member of the Protein Kinase superfamily. It is further classified into the STE group, and the STE11 family. The nucleic acid sequence is 2571 nucleotides long, and codes for a protein that is 735 amino acids long. The open reading frame starts at nucleotide number 1 and ends at nucleotide number 2208. The length of the ORF is 2208 nucleotides. The gene has been mapped to chromosomal region 2q21.3.

[0489] One alternative splice variant was noted:

>MAP3K8, SEQ ID NO: 44 Replaces nucleotides
1412-2571
GTTCAAGTCCAATGGGAAAGAAATATCTTCCTTCAACAGCTGAATATGTT
ACTGGAAGTTTGGAGAATCATTACTAGATGGCAAAAACAAAAGATGTTCC
TTCCATTTTGTGAACTGCATAAGAGATCTTGGGGGGTGGGCGATGAAGAG
AGGTATACTGTGGTCTCACTAGTCAAGGACAGCTAATAGCTGTAAAACAG
GTGGCTTTGGATAACT

[0490] Pak4_m, SEQ ID NO: 45 SEQ ID NO: 111, is the only murine sequence in this application. It is a member of the Protein Kinase superfamily, further classified into the STE group, and the STE20 family. The nucleic acid sequence is 1782 nucleotides long, and codes for a protein that is 593 amino acids long. The open reading frame starts at nucleotide number 1 and ends at nucleotide number 1782. The length of the ORF is 1782 nucleotides. The human ortholog has been mapped to 19q13.2.

[0491] STLK6-rs, SEQ ID NO: 46 SEQ ID NO: 112, is a member of the Protein Kinase superfamily. It is further classified into the STE group, and the STE20 family. The nucleic acid sequence is 2171 nucleotides long, and codes for a protein that is 418 amino acids long. The open reading frame starts at nucleotide number 242 and ends at nucleotide number 1498. The length of the ORF is 1257 nucleotides. The gene has been mapped to chromosomal region 1p33.

[0492] MAP2K2, SEQ ID NO: 47 SEQ ID NO: 113, is a member of the Protein Kinase superfamily. It is further classified into the STE group, and the STE7 family. The nucleic acid sequence is 1724 nucleotides long, and codes for a protein that is 380 amino acids long. The open reading frame starts at nucleotide number 248 and ends at nucleotide number 1390. The length of the ORF is 1143 nucleotides. Sugen has cloned the full length cDNA for this gene. The gene has been mapped to chromosomal region 7q34.

[0493] CCK4, SEQ ID NO: 48 SEQ ID NO: 114, is a member of the Protein Kinase superfamily. It is further classified into the TK group, and the CCK4 family. The nucleic acid sequence is 4232 nucleotides long, and codes for a protein that is 1070 amino acids long. The open reading frame starts at nucleotide number 191 and ends at nucleotide number 3403. The length of the ORF is 3213 nucleotides. The full length cDNA for this gene has been cloned. The gene has been mapped to chromosomal region 6p21-p12.

[0494] LMR1, SEQ ID NO: 49 SEQ ID NO: 115, is a member of the Protein Kinase superfamily. It is further classified into the TK group, and the Lmr family. The nucleic acid sequence is 5313 nucleotides long, and codes for a protein that is 1374 amino acids long. The open reading frame starts at nucleotide number 85 and ends at nucleotide number 4209. The length of the ORF is 4125 nucleotides. The full length cDNA for this gene has been cloned. The gene has been mapped to chromosomal region 17q25.

[0495] RYK, SEQ ID NO: 50 SEQ ID NO: 116, is a member of the Protein Kinase superfamily. It is further classified into the TK group, and the Ryk family. The nucleic acid sequence is 3663 nucleotides long, and codes for a protein that is 607 amino acids long. The open reading frame starts at nucleotide number 91 and ends at nucleotide number 1914. The length of the ORF is 1824 nucleotides. The gene has been mapped to chromosomal region 3q22.

[0496] LRRK2, SEQ ID NO: 51 SEQ ID NO: 117, is a member of the Protein Kinase superfamily. It is further classified into the TKL group, and the LRRK family. The nucleic acid sequence is 9753 nucleotides long, and codes for a protein that is 2534 amino acids long. The open reading frame starts at nucleotide number 633 and ends at nucleotide number 8237. The length of the ORF is 7605 nucleotides. The gene has been mapped to chromosomal region 12q11-q12.

[0497] For LRRK2, the 3′ most 4 nucleotides of the original SGKO40 sequence were mispredicted. Correcting the prediction removes the stop and allows for further 3′ extension. The sequence was extended at the 3′ end by three EST/cDNA sequences (Incyte templates 215217.7 and 215217.9 and NCBI_nr cDNA gi|17454342). Two different splice variants were present. Because the Incyte template 215217.7 and the NCBI_nr cDNA gi|17454342 3′ extension yields a longer ORF it was used in the final sequence, extending the sequence in the 3′ direction by 133 AA and through the stop codon. The 5′ most 52 nucleotides of the original sequence were mispredicted and removed from the final revised sequence. The 5′ end of the sequence was extended by an overlapping Incyte flft CB1 sequence (71059650CB1) which is supported in two different stretches by over lapping Incyte templates (1017699.1, 316571.1, 415310.1 and 295385.1). Parts of the 5′ extension are based on the Incyte CB1 sequence and a genscan prediction. The N-terminus was extended by approximately 1500 AA.

[0498] pMLK4, SEQ ID NO: 52 SEQ ID NO: 118, is a member of the Protein Kinase superfamily. It is further classified into the TKL group, and the MLK family. The nucleic acid sequence is 4667 nucleotides long, and codes for a protein that is 1036 amino acids long. The open reading frame starts at nucleotide number 262 and ends at nucleotide number 3372. The length of the ORF is 3111 nucleotides. The full length cDNA for this gene has been cloned. The gene has been mapped to chromosomal region 1q42.2.

[0499] KSR, SEQ ID NO: 53 SEQ ID NO: 119, is a member of the Protein Kinase superfamily. It is further classified into the TKL group, and the RAF family. The nucleic acid sequence is 5913 nucleotides long, and codes for a protein that is 901 amino acids long. The open reading frame starts at nucleotide number 165 and ends at nucleotide number 2870. The length of the ORF is 2706 nucleotides. The gene has been mapped to chromosomal region 17q 11.1. This region has been identified as a cancer amplicon (Knuutila, et al).

[0500] The patent sequence for KSR, SEQ ID NO: 53 SEQ ID NO: 119 is full length, and aligns across the full length with the mouse ortholog.

[0501] KSR2, SEQ ID NO: 54 SEQ ID NO: 120, is a member of the Protein Kinase superfamily. It is further classified into the TKL group, and the RAF family. The nucleic acid sequence is 2994 nucleotides long, and codes for a protein that is 982 amino acids long. The open reading frame starts at nucleotide number 1 and ends at nucleotide number 2949. The length of the ORF is 2949 nucleotides. The full length cDNA for this gene has been cloned. The gene has been mapped to chromosomal region 12q24.3.

[0502] KIAA1646, SEQ ID NO: 55 SEQ ID NO: 121, is a member of the Lipid Kinase superfamily. It is further classified into the DAG kin group, and the DAG kin family. The nucleic acid sequence is 4429 nucleotides long, and codes for a protein that is 537 amino acids long. The open reading frame starts at nucleotide number 92 and ends at nucleotide number 1705. The length of the ORF is 1614 nucleotides. The gene has been mapped to chromosomal region 22q13.31.

[0503] DGK-beta, SEQ ID NO: 56 SEQ ID NO: 122, is a member of the Lipid Kinase superfamily. It is further classified into the DAG kin group, and the DAG kin family. The nucleic acid sequence is 4297 nucleotides long, and codes for a protein that is 804 amino acids long. The open reading frame starts at nucleotide number 372 and ends at nucleotide number 2786. The length of the ORF is 2415 nucleotides. The fall length cDNA for this gene has been cloned. The gene has been mapped to chromosomal region 7p21.3-p22. This region has been associated with susceptibility to osteoarthritis (OMIM 140600).

[0504] IP6K1, SEQ ID NO: 57 SEQ ID NO.: 123, is a member of the Lipid Kinase superfamily. It is further classified into the Inositol kinase group, and the IP6K family. The nucleic acid sequence is 4461 nucleotides long, and codes for a protein that is 441 amino acids long. The open reading frame starts at nucleotide number 309 and ends at nucleotide number 1634. The length of the ORF is 1326 nucleotides. The gene has been mapped to chromosomal region 3p21.31.

[0505] YAB1, SEQ ID NO: 58 SEQ ID NO: 124, is a member of the Atypical PK superfamily. It is further classified into the Atypical group, and the ABC1 family. The nucleic acid sequence is 2508 nucleotides long, and codes for a protein that is 647 amino acids long. The open reading frame starts at nucleotide number 99 and ends at nucleotide number 2042. The length of the ORF is 1944 nucleotides. The full length cDNA for this gene has been cloned. The gene has been mapped to chromosomal region 1q42. This region has been associated with susceptibility to schizophrenia (OMIM 181500).

[0506] AF052122, SEQ ID NO: 59 SEQ ID NO: 125, is a member of the Atypical PK superfamily. It is further classified into the Atypical group, and the ABC1 family. The nucleic acid sequence is 5237 nucleotides long, and codes for a protein that is 591 amino acids long. The open reading frame starts at nucleotide number 1 and ends at nucleotide number 1776. The length of the ORF is 1776 nucleotides. Sugen has cloned the full length cDNA for this gene. The gene has been mapped to chromosomal region 19q13.1. This region has been identified as a cancer amplicon (Knuutila, et al).

[0507] AAF23326, SEQ ID NO: 60 SEQ ID NO: 126, is a member of the Atypical PK superfamily. It is further classified into the Atypical group, and the ABC1 family. The nucleic acid sequence is 1368 nucleotides long, and codes for a protein that is 455 amino acids long. The open reading frame starts at nucleotide number 1 and ends at nucleotide number 1368. The length of the ORF is 1368 nucleotides. The full length cDNA for this gene has been cloned. The gene has been mapped to chromosomal region 14q24.3-q32.

[0508] SGK493, SEQ ID NO: 61 SEQ ID NO: 127, is a member of the Atypical PK superfamily. It is further classified into the Atypical group, and the RIO1 family. The nucleic acid sequence is 1832 nucleotides long, and codes for a protein that is 552 amino acids long. The open reading frame starts at nucleotide number 50 and ends at nucleotide number 1708. The length of the ORF is 1659 nucleotides. The full length cDNA for this gene has been cloned. The gene has been mapped to chromosomal region 5q14.

[0509] BRD2, SEQ ID NO: 62 SEQ ID NO: 128, is a member of the Atypical PK superfamily. It is further classified into the BRD group, and the BRD family. The nucleic acid sequence is 4693 nucleotides long, and codes for a protein that is 801 amino acids long. The open reading frame starts at nucleotide number 1702 and ends at nucleotide number 4107. The length of the ORF is 2406 nucleotides. The gene has been mapped to chromosomal region 6p21.2.

[0510] BRD3, SEQ ID NO: 63, SEQ ID NO: 129, is a member of the Atypical PK superfamily. It is further classified into the BRD group, and the BRD-family. The nucleic acid sequence is 3085 nucleotides long, and codes for a protein that is 726 amino acids long. The open reading frame starts at nucleotide number 140 and ends at nucleotide number 2320. The length of the ORF is 2181 nucleotides. The gene has been mapped to chromosomal region 9q34.

[0511] BRD4, SEQ ID NO: 64, SEQ ID NO: 130, is a member of the Atypical PK superfamily. It is further classified into the BRD group, and the BRD family. The nucleic acid sequence is 3149 nucleotides long, and codes for a protein that is 722 amino acids long. The open reading frame starts at nucleotide number 223 and ends at nucleotide number 2391. The length of the ORF is 2169 nucleotides. The gene has been mapped to chromosomal region 19p13.2.

[0512] BRDT, SEQ ID NO: 65, SEQ ID NO: 131, is a member of the Atypical PK superfamily. It is further classified into the BRD group, and the BRD family. The nucleic acid sequence is 3106 nucleotides long, and codes for a protein that is 947 amino acids long. The open reading frame starts at nucleotide number 108 and ends at nucleotide number 2951. The length of the ORF is 2844 nucleotides. The gene has been mapped to chromosomal region 1p21.

[0513] ZC1, SEQ ID NO: 66, SEQ ID NO: 132 is a member of the protein kinase superfamily, the STE group, and the STE20 family. The nucleic acid sequence is 7986 nucleotides long, and codes for a protein (in its longest form) of 1392 amino acids (see below for splice variants). The open reading frame starts at nucleotide number 366 and ends at nucleotide number 4544. The length of the ORF is 4179 nucleotides. The gene has been mapped to chromosomal region 2q11.1-q11.2.

[0514] PolyA tails are present in ZC1, SEQ ID NO: 66 after position 4791, position 6100 and position 7986. All sites are within the 3 prime untranslated region and do not alter the protein sequence. Differential use of these polyadenylation sites has been seen in ESTs from brain and other tissues, indicating that sequences within the untranslated region may be involved in controlling gene expression in a tissue-specific manner. Alternatively spliced transcripts have been seen in cDNA and EST sequences which lack portions of this sequence. Nine sections (modules) of this sequence are alternatively spliced and it is predicted that transcripts containing all combinations of alternatively spliced modules exist. All alternatively spliced modules are within the open reading frame and contain a multiple of three nucleotides. Therefore, omission of any one module from a transcript results in an inframe deletion of a peptide from the protein. No frameshifts or premature stops are produced by any of these alternatively spliced forms. The positions of the modules on the DNA and protein sequences are as follows:

| | DNA | Protein | |
|---|---|---|---|
| Module | range | Range | Notes for ZC1, SEQ ID NO: 66 |
| M1 | 1761-1847 | 466-494 | Encodes C-terminal extension of |
| | | | coiled-coil domain. Similar module |
| | | | found in the paralogous gene. TNIK. |
| M2 | 1848-1940 | 495-525 | |
| M3 | 2070-2231 | 569-622 | Similar module found in TNIK. |
| | | | Contains 2 PxxP motifs, predicted to |
| | | | bind SH3-domain proteins |
| M4 | 2232-2462 | 623-694 | Contains 2 PxxP motifs. |
| M5 | 2568-2570 | 736-736 | |
| M6 | 2821-2829 | 819-821 | |
| M7 | 3126-3317 | 921-984 | |
| M8 | 4008-4064 | 1215-1233 | Encodes part of CNH domain. Similar |
| | | | sequence seen in other human GCK-IV |
| | | | kinases |
| M9 | 4137-4160 | 1258-1265 | Encodes part of CNH domain. Similar |
| | | | sequence not seen in other CNH |
| | | | domains. |

### Example 2a

### Expression Analysis of Polypeptides of the Invention

[0515] The gene expression patterns for selected genes were studied using a PCR screen of 96 human tissues. This technique does not yield quantitative expression levels between tissues, but does identify which tissues express the gene at a level detectable by PCR and those which do not.

### Example 2b

### Predicted Proteins

[0516] II. Predicted Proteins

[0517] Description of the Proteins—Smith-Waterman Comparisons (Table 2, a & b)

[0518] CRIK, SEQ ID NO: 1, SEQ ID NO: 67 encodes a protein that is 2055 amino acids long. The results of a Smith-Waterman search of the NCBI non-redundant protein database with the amino acid sequence for this protein yielded the following results: P score=0; number of matches: 1975; percent identity over the alignment: 96%; percent similarity over the alignment: 98%; accession number for best hit: AAC72823.1; description and species for best-hit: Rho/rac-interacting citron kinase [Mus musculus]. The boundaries of the alignments for the query and the database (target) amino acid sequences were as follows. Query start: 1; query end: 2055; target start: 1; target end: 2055. The percent of the query that aligns with the target is: 96%. The percent of the target that aligns with the query is: 96%.

[0519] DMPK2, SEQ ID NO: 2, SEQ ID NO: 68 encodes a protein that is 1572 amino acids long. The results of a Smith-Waterman search of the NCBI non-redundant protein database with the amino acid sequence for this protein yielded the following results: P score=2.20E-211; number of matches: 731; percent identity over the alignment: 45%; percent similarity-over the alignment: 63%; accession number for best hit: NP_{—}446109.1; description and species for best hit: Ser-Thr protein kinase related to the myotonic dystrophy protein kinase [Rattus norvegicus]. The boundaries of the alignments for the query and the database (target) amino acid sequences were as follows. Query start: 2; query end: 1462; target start: 4; target end: 1588. The percent of the query that aligns with the target is: 46%. The percent of the target that aligns with the query is: 42%.

[0520] MAST3, SEQ ID NO: 3, SEQ ID NO: 69 encodes a protein that is 1331 amino acids long. The results of a Smith-Waterman search of the NCBI non-redundant protein database with the amino acid sequence for this protein yielded the following results: P score=0; number of matches: 1287; percent identity over the alignment: 99%; percent similarity over the alignment: 99%; accession number for best hit: BAA25487.1; description and species for best hit: (AB011133) KIAA0561 protein [Homo sapiens]. The boundaries of the alignments for the query and the database (target) amino acid sequences were as follows. Query start: 39; query end: 1331; target start: 16; target end: 1308. The percent of the query that aligns with the target is: 96%. The percent of the target that aligns with the query is: 98%.

[0521] MAST205, SEQ ID NO: 4, SEQ ID NO: 70 encodes a protein that is 1798 amino acids long. The results of a Smith-Waterman search of the NCBI non-redundant protein database with the amino acid sequence for this protein yielded the following results: P score=0; number of matches: 1684; percent identity over the alignment: 99%; percent similarity over the alignment: 99%; accession number for best hit: NP_{—}055927.1; description and species for best hit: KIAA0807 protein [Homo sapiens]. The boundaries of the alignments for the query and the database (target) amino acid sequences were as follows. Query start: 1; query end: 1687; target start: 1; target end: 1687. The percent of the query that aligns with the target is: 93%. The percent of the target that aligns with the query is: 97%.

[0522] MASTL, SEQ ID NO: 5, SEQ ID NO: 71 encodes a protein that is 878 amino acids long. The results of a Smith-Waterman search of the NCBI non-redundant protein database with the amino acid sequence for this protein yielded the following results: P score=0; number of matches: 876; percent identity over the alignment: 99%; percent similarity over the alignment: 99%; accession number for best hit: NP_{—}116233.1; description and species for best hit: Hypothetical protein FLJ14813 [Homo sapiens]. The boundaries of the alignments for the query and the database (target) amino acid sequences were as follows. Query start: 1; query end: 878; target start: 1; target end: 878. The percent of the query that aligns with the target is: 99%. The percent of the target that aligns with the query is: 99%.

[0523] PKC_eta, SEQ ID NO: 6, SEQ ID NO: 72 encodes a protein that is 683 amino acids long. The results of a Smith-Waterman search of the NCBI non-redundant protein database with the amino acid sequence for this protein yielded the following results: P score=0; number of matches: 679; percent identity over the alignment: 99%; percent similarity over the alignment: 99%; accession number for best hit: NP_{—}006246.1; description and species for best hit: (NM_{—}006255) protein kinase C, eta [Homo sapiens]. The boundaries of the alignments for the query and the database (target) amino acid sequences were as follows. Query start: 1; query end: 683; target start: 1; target end: 682. The percent of the query that aligns with the target is: 99%. The percent of the target that aligns with the query is: 99%.

[0524] H19102, SEQ ID NO: 7, SEQ ID NO: 73 encodes a protein that is 449 amino acids long. The results of a Smith-Waterman search of the NCBI non-redundant protein database with the amino acid sequence for this protein yielded the following results: P score=1.00E-124; number of matches: 269; percent identity over the alignment: 99%; percent similarity over the alignment: 99%; accession number for best hit: BAB71555.1; description and species for best hit: Unnamed protein product [Homo sapiens]. The boundaries of the alignments for the query and the database (target) amino acid sequences were as follows. Query start: 41; query end: 310; target start: 1; target end: 271. The percent of the query that aligns with the target is: 59%. The percent of the target that aligns with the query is: 98%.

[0525] MSK1, SEQ ID NO: 8, SEQ ID NO: 74 encodes a protein that is 802 amino acids long. The results of a Smith-Waterman search of the NCBI non-redundant protein database with the amino acid sequence for this protein yielded the following results: P score=3.50E-304; number of matches: 787; percent identity over the alignment: 98%; percent similarity over the alignment: 98%; accession number for best hit: NP_{—}004746.1; description and species for best hit: (NM_{—}004755) ribosomal protein S6 kinase, 90 kD, polypeptide 5; mitogen- and stress-activated protein kinase 1 [Homo sapiens]. The boundaries of the alignments for the query and the database (target) amino acid sequences were as follows. Query start: 1; query end: 800; target start: 1; target end: 800. The percent of the query that aligns with the target is: 98%. The percent of the target that aligns with the query is: 97%.

[0526] YANK3, SEQ ID NO: 9, SEQ ID NO: 75 encodes a protein that is 486 amino acids long. The results of a Smith-Waterman search of the NCBI non-redundant protein database with the amino acid sequence for this protein yielded the following results: P score=8.9e-311; number of matches: 444; percent identity over the alignment: 91%; percent similarity over the alignment: 94%; accession number for best hit: AAH26457; description and species for best hit: (BC026457) hypothetical serine/threonine protein kinase [Mus musculus]. The boundaries of the alignments for the query and the database (target) amino acid sequences were as follows. Query start: 1; query end: 485; target start: 1; target end: 487. The percent of the query that aligns with the target is: 91%. The percent of the target that aligns with the query is: 90%.

[0527] MARK2, SEQ ID NO: 10, SEQ ID NO: 76 encodes a protein that is 787 amino acids long. The results of a Smith-Waterman search of the NCBI non-redundant protein database with the amino acid sequence for this protein yielded the following results: P score=2.60E-299; number of matches: 752; percent identity over the alignment: 99%; percent similarity over the alignment: 99%; accession number for best hit: AAH08771.1; description and species for best hit: (BC008771) Similar to ELKL motif kinase [Homo sapiens]. The boundaries of the alignments for the query and the database (target) amino acid sequences were as follows. Query start: 34; query end: 787; target start: 1; target end: 755. The percent of the query that aligns with the target is: 95%. The percent of the target that aligns with the query is: 99%.

[0528] NuaK2, SEQ ID NO: 11, SEQ ID NO: 77 encodes a protein that is 672 amino acids long. The results of a Smith-Waterman search of the NCBI non-redundant protein database with the amino acid sequence for this protein yielded the following results: P score=5.10E-269; number of matches: 628; percent identity over the alignment: 100%; percent similarity over the alignment: 100%; accession number for best hit: NP_{—}112214.1; description and species for best hit: (NM_{—}030952) hypothetical protein DKFZp434J037 [Homo sapiens]. The boundaries of the alignments for the query and the database (target) amino acid sequences were as follows. Query start: 45; query end: 672; target start: 1; target end: 628. The percent of the query that aligns with the target is: 93%. The percent of the target that aligns with the query is: 100%.

[0529] BRSK2, SEQ ID NO: 12, SEQ ID NO: 78 encodes a protein that is 674 amino acids long. The results of a Smith-Waterman search of the NCBI non-redundant protein database with the amino acid sequence for this protein yielded the following results: P score=4.20E-175; number of matches: 602; percent identity over the alignment: 99%; percent similarity over the alignment: 99%; accession number for best hit: CAA07196.1; description and species for best hit: Putative serine/threonine protein kinase [Homo sapiens]. The boundaries of the alignments for the query and the database (target) amino acid sequences were as follows. Query start: 72; query end: 674; target start: 1; target end: 603. The percent of the query that aligns with the target is: 89%. The percent of the target that aligns with the query is: 99%.

[0530] MARK4, SEQ ID NO: 13, SEQ ID NO: 79 encodes a protein that is 752 amino acids long. The results of a Smith-Waterman search of the NCBI non-redundant protein database with the amino acid sequence for this protein yielded the following results: P score=4.30E-298; number of matches: 751; percent identity over the alignment: 99%; percent similarity over the alignment: 99%; accession number for best hit: AAL23683.1; description and species for best hit: MARK4 serine/threonine protein kinase [Homo sapiens]. The boundaries of the alignments for the query and the database (target) amino acid sequences were as follows. Query start: 1; query end: 752; target start: 1; target end: 752. The percent of the query that aligns with the target is: 99%. The percent of the target that aligns with the query is: 99%.

[0531] DCAMKL2, SEQ ID NO: 14, SEQ ID NO: 80 encodes a protein that is 766 amino acids long. The results of a Smith-Waterman search of the NCBI non-redundant protein database with the amino acid sequence for this protein yielded the following results: P score=8.10E-159; number of matches: 513; percent identity over the alignment: 67%; percent similarity over the alignment: 80%; accession number for best hit: 015075; description and species for best hit: DCAMKL1 (doublecortin-like and CAMK-like 1) [Homo sapiens]. The boundaries of the alignments for the query and the database (target) amino acid sequences were as follows. Query start: 1; query end: 741; target start: 1; target end: 739. The percent of the query that aligns with the target is: 66%. The percent of the target that aligns with the query is: 69%.

[0532] PIM2, SEQ ID NO: 15, SEQ ID NO: 81 encodes a protein that is 434 amino acids long. The results of a Smith-Waterman search of the NCBI non-redundant protein database with the amino acid sequence for this protein yielded the following results: P score=1.40E-145; number of matches: 334; percent identity over the alignment: 100%; percent similarity over the alignment: 100%; accession number for best hit: NP_{—}006866.1; description and species for best hit: (NM_{—}006875) pim-2 oncogene; proto-oncogene Pim-2 (serine threonine kinase) [Homo sapiens]. The boundaries of the alignments for the query and the database (target) amino acid sequences were as follows. Query start: 101; query end: 434; target start: 1; target end: 334. The percent of the query that aligns with the target is: 76%. The percent of the target that aligns with the query is: 100%.

[0533] PIM3, SEQ ID NO: 16, SEQ ID NO: 82 encodes a protein that is 326 amino acids long. The results of a Smith-Waterman search of the NCBI non-redundant protein database with the amino acid sequence for this protein yielded the following results: P score=9.90E-174; number of matches: 311; percent identity over the alignment: 95%; percent similarity over the alignment: 97%; accession number for best hit: AAH17621.1; description and species for best hit: Serine threonine kinase pim3 [Mus musculus]. The boundaries of the alignments for the query and the database (target) amino acid sequences were as follows. Query start: 1; query end: 326; target start: 1; target end: 326. The percent of the query that aligns with the target is: 95%. The percent of the target that aligns with the query is: 95%.

[0534] TSSK4, SEQ ID NO: 17, SEQ ID NO: 83 encodes a protein that is 328 amino acids long. The results of a Smith-Waterman search of the NCBI non-redundant protein database with the amino acid sequence for this protein yielded the following results: P score=1.60E-69; number of matches: 281; percent identity over the alignment: 85%; percent similarity over the alignment: 94%; accession number for best hit: BAB30483.1; description and species for best hit: Putative [Mus musculus]. The boundaries of the alignments for the query and the database (target) amino acid sequences were as follows. Query start: 1; query end: 328; target start: 1; target end: 328. The percent of the query that aligns with the target is: 85%. The percent of the target that aligns with the query is: 85%.

[0535] CKIL2, SEQ ID NO: 18, SEQ ID NO: 84 encodes a protein that is 1244 amino acids long. The results of a Smith-Waterman search of the NCBI non-redundant protein database with the amino acid sequence for this protein yielded the following results: P score=1.50E-298; number of matches: 645; percent identity over the alignment: 100%; percent similarity over the alignment: 100%; accession number for best hit: BAA74870.1; description and species for best hit: KIAA0847 protein [Homo sapiens]. The boundaries of the alignments for the query and the database (target) amino acid sequences were as follows. Query start: 600; query end: 1244; target start: 1; target end: 645. The percent of the query that aligns with the target is: 51%. The percent of the target that aligns with the query is: 100%.

[0536] PCTAIRE3, SEQ ID NO: 19, SEQ ID NO: 85 encodes a protein that is 504 amino acids long. The results of a Smith-Waterman search of the NCBI non-redundant protein database with the amino acid sequence for this protein yielded the following results: P score=1.50E-220; number of matches: 471; percent identity over the alignment: 93%; percent similarity over the alignment: 93%; accession number for best hit: Q07002; description and species for best hit: Serine/threonine protein kinase PCTAIRE-3 [Homo sapiens]. The boundaries of the alignments for the query and the database (target) amino acid sequences were as follows. Query start: 1; query end: 502; target start: 1; target end: 472. The percent of the query that aligns with the target is: 93%. The percent of the target that aligns with the query is: 99%.

[0537] PFTAIRE2, SEQ ID NO: 20, SEQ ID NO: 86 encodes a protein that is 435 amino acids long. The results of a Smith-Waterman search of the NCBI non-redundant protein database with the amino acid sequence for this protein yielded the following results: P score=8.40E-100; number of matches: 225; percent identity over the alignment: 68%; percent similarity over the alignment: 81%; accession number for best hit: NP 035204.1; description and species for best hit: (NM_{—}011074) PFTAIRE protein kinase 1 [Mus musculus]. The boundaries of the alignments for the query and the database (target) amino acid sequences were as follows. Query start: 97; query end: 426; target start: 129; target end: 458. The percent of the query that aligns with the target is: 51%. The percent of the target that aligns with the query is: 47%.

[0538] ERK7, SEQ ID NO: 21, SEQ ID NO: 87 encodes a protein that is 563 amino acids long. The results of a Smith-Waterman search of the NCBI non-redundant protein database with the amino acid sequence for this protein yielded the following results: P score=1.90E-128; number of matches: 384; percent identity over the alignment: 67%; percent similarity over the alignment: 75%; accession number for best hit: AAD12719.2; description and species for best hit: Extracellular signal-regulated kinase 7; ERK7 [Rattus norvegicus]. The boundaries of the alignments for the query and the database (target) amino acid sequences were as follows. Query start: 1; query end: 560; target start: 1; target end: 544. The percent of the query that aligns with the target is: 68%. The percent of the target that aligns with the query is: 70%.

[0539] CKIIa-rs, SEQ ID NO: 22, SEQ ID NO: 88 encodes a protein that is 391 amino acids long. The results of a Smith-Waterman search of the NCBI non-redundant protein database with the amino acid sequence for this protein yielded the following results: P score=9.60E-195; number of matches: 390; percent identity over the alignment: 99%; percent similarity over the alignment: 100%; accession number for best hit: CAA49758.1; description and species for best hit: Casein kinase II alpha subunit [Homo sapiens]. The boundaries of the alignments for the query and the database (target) amino acid sequences were as follows. Query start: 1; query end: 391; target start: 1; target end: 391. The percent of the query that aligns with the target is: 99%. The percent of the target that aligns with the query is: 99%.

[0540] DYRK4, SEQ ID NO: 23, SEQ ID NO: 89 encodes a protein that is 921 amino acids long. The results of a Smith-Waterman search of the NCBI non-redundant protein database with the amino acid sequence for this protein yielded the following results: P score=1.20E-304; number of matches: 526; percent identity over the alignment: 99%; percent similarity over the alignment: 100%; accession number for best hit: Q9NR20; description and species for best hit: DYRK4 4 [Homo sapiens]. The boundaries of the alignments for the query and the database (target) amino acid sequences were as follows. Query start: 395; query end: 921; target start: 15; target end: 541. The percent of the query that aligns with the target is: 57%. The percent of the target that aligns with the query is: 97%.

[0541] HIPK1, SEQ ID NO: 24, SEQ ID NO: 90 encodes a protein that is 1210 amino acids long. The results of a Smith-Waterman search of the NCBI non-redundant protein database with the amino acid sequence for this protein yielded the following results: P score=0; number of matches: 1181; percent identity over the alignment: 97%; percent similarity over the alignment: 99%; accession number for best hit: AAD41592.1; description and species for best hit: Myak-L [Mus musculus]. The boundaries of the alignments for the query and the database (target) amino acid sequences were as follows. Query start: 1; query end: 1210; target start: 1; target end: 1210. The percent of the query that aligns with the target is: 97%. The percent of the target that aligns with the query is: 97%.

[0542] HIPK4, SEQ ID NO: 25, SEQ ID NO: 91 encodes a protein that is 616 amino acids long. The results of a Smith-Waterman search of the NCBI non-redundant protein database with the amino acid sequence for this protein yielded the following results: P score=0; number of matches: 598; percent identity over the alignment: 97%; percent similarity over the alignment: 98%; accession number for best hit: BAB72080.1; description and species for best hit: Hypothetical protein [Macaca fascicularis]. The boundaries of the alignments for the query and the database (target) amino acid sequences were as follows. Query start: 1; query end: 616; target start: 1; target end: 616. The percent of the query that aligns with the target is: 97%. The percent of the target that aligns with the query is: 97%.

[0543] BIKE, SEQ ID NO: 26, SEQ ID NO: 92 encodes a protein that is 1161 amino acids long. The results of a Smith-Waterman search of the NCBI non-redundant protein database with the amino acid sequence for this protein yielded the following results: P score=7.60E-244; number of matches: 960; percent identity over the alignment: 82%; percent similarity over the alignment: 89%; accession number for best hit: NP_{—}542439.1; description and species for best hit: (NM_{—}080708) Bmp2-inducible kinase [Mus musculus]. The boundaries of the alignments for the query and the database (target) amino acid sequences were as follows. Query start: 1; query end: 1161; target start: 1; target end: 1138. The percent of the query that aligns with the target is: 82%. The percent of the target that aligns with the query is: 84%.

[0544] NEK10, SEQ ID NO: 27, SEQ ID NO: 93 encodes a protein that is 1125 amino acids long. The results of a Smith-Waterman search of the NCBI non-redundant protein database with the amino acid sequence for this protein yielded the following results: P score=9.80E-185; number of matches: 428; percent identity over the alignment: 90%; percent similarity over the alignment: 90%; accession number for best hit: BAB71395.1; description and species for best hit: (AK057247) unnamed protein product [Homo sapiens]. The boundaries of the alignments for the query and the database (target) amino acid sequences were as follows. Query start: 698; query end: 1125; target start: 10; target end: 484. The percent of the query that aligns with the target is: 38%. The percent of the target that aligns with the query is: 88%.

[0545] pNEK5, SEQ ID NO: 28, SEQ ID NO: 94 encodes a protein that is 889 amino acids long. The results of a Smith-Waterman search of the NCBI non-redundant protein database with the amino acid sequence for this protein yielded the following results: P score=1.60E-78; number of matches: 180; percent identity over the alignment: 65%; percent similarity over the alignment: 82%; accession number for best hit: P51954; description and species for best hit: Serine/threonine-protein kinase NEK1 (NimA-related protein kinase 1) [Mus musculus]. The boundaries of the alignments for the query and the database (target) amino acid sequences were as follows. Query start: 58; query end: 333; target start: 1; target end: 275. The percent of the query that aligns with the target is: 20%. The percent of the target that aligns with the query is: 23%.

[0546] NEK1, SEQ ID NO: 29, SEQ ID NO: 95 encodes a protein that is 1286 amino acids long. The results of a Smith-Waterman search of the NCBI non-redundant protein database with the amino acid sequence for this protein yielded the following results: P score=0; number of matches: 1258; percent identity over the alignment: 97%; percent similarity over the alignment: 97%; accession number for best hit: BAB67794.1; description and species for best hit: KIAA1901 protein [Homo sapiens]. The boundaries of the alignments for the query and the database (target) amino acid sequences were as follows. Query start: 1; query end: 1286; target start: 8; target end: 1265. The percent of the query that aligns with the target is: 97%. The percent of the target that aligns with the query is: 99%.

[0547] NEK3, SEQ ID NO: 30, SEQ ID NO: 96 encodes a protein that is 506 amino acids long. The results of a Smith-Waterman search of the NCBI non-redundant protein database with the amino acid sequence for this protein yielded the following results: P score=1.80E-202; number of matches: 458; percent identity over the alignment: 99%; percent similarity over the alignment: 99%; accession number for best hit: P51956; description and species for best hit: SERINE/THREONINE-PROTEIN KINASE NEK3 (NIMA-RELATED PROTEIN KINASE 3) (HSPK 36) [Homo sapiens]. The boundaries of the alignments for the query and the database (target) amino acid sequences were as follows. Query start: 48; query end: 506; target start: 1; target end: 459. The percent of the query that aligns with the target is: 90%. The percent of the target that aligns with the query is: 99%.

[0548] SGK069, SEQ ID NO: 31, SEQ ID NO: 97 encodes a protein that is 348 amino acids long. The results of a Smith-Waterman search of the NCBI non-redundant protein database with the amino acid sequence for this protein yielded the following results: P score=7.40E-48; number of matches: 122; percent identity over the alignment: 42%; percent similarity over the alignment: 59%; accession number for best hit: AAK52420.1; description and species for best hit: Protein kinase Bsk146 [Danio rerio]. The boundaries of the alignments for the query and the database (target) amino acid sequences were as follows. Query start: 1; query end: 348; target start: 394; target end: 763. The percent of the query that aligns with the target is: 99%. The percent of the target that aligns with the query is: 41%.

[0549] SGK110, SEQ ID NO: 32, SEQ ID NO: 98 encodes a protein that is 414 amino acids long. The results of a Smith-Waterman search of the NCBI non-redundant protein database with the amino acid sequence for this protein yielded the following results: P score=4.00E-35; number of matches: 110; percent identity over the alignment: 41%; percent similarity over the alignment: 60%; accession number for best hit: S71887; description and species for best hit: serine/threonine-specific kinase (EC 2.7.1.-), pk9.7 gastrula-specific [Xenopus laevis]. The boundaries of the alignments for the query and the database (target) amino acid sequences were as follows. Query start: 96; query end: 359; target start: 9; target end: 272. The percent of the query that aligns with the target is: 26%. The percent of the target that aligns with the query is: 30%.

[0550] NRBP2, SEQ ID NO: 33, SEQ ID NO: 99 encodes a protein that is 507 amino acids long. The results of a Smith-Waterman search of the NCBI non-redundant protein database with the amino acid sequence for this protein yielded the following results: P score=3.20E-158; number of matches: 300; percent identity over the alignment: 61%; percent similarity over the alignment: 75%; accession number for best hit: NP_{—}037524.1; description and species for best hit: Nuclear receptor binding protein; multiple domain putative nuclear protein [Homo sapiens]. The boundaries of the alignments for the query and the database (target) amino acid sequences were as follows. Query start: 17; query end: 502; target start: 44; target end: 518. The percent of the query that aligns with the target is: 59%. The percent of the target that aligns with the query is: 56%.

[0551] CNK, SEQ ID NO: 34, SEQ ID NO: 100 encodes a protein that is 646 amino acids long. The results of a Smith-Waterman search of the NCBI non-redundant protein database with the amino acid sequence for this protein yielded the following results: P score=8.60E-236; number of matches: 645; percent identity over the alignment: 99%; percent similarity over the alignment: 100%; accession number for best hit: AAH13899.1; description and species for best hit: (BC013899) Unknown (protein for MGC: 14852) [Homo sapiens]. The boundaries of the alignments for the query and the database (target) amino acid sequences were as follows. Query start: 1; query end: 646; target start: 1; target end: 646. The percent of the query that aligns with the target is: 99%. The percent of the target that aligns with the query is: 99%.

[0552] SCYL2, SEQ ID NO: 35, SEQ ID NO: 101 encodes a protein that is 933 amino acids long. The results of a Smith-Waterman search of the NCBI non-redundant protein database with the amino acid sequence for this protein yielded the following results: P score=0; number of matches: 791; percent identity over the alignment: 99%; percent similarity over the alignment: 99%; accession number for best hit: BAA92598.1; description and species for best hit: KLAA1360 protein [Homo sapiens]. The boundaries of the alignments for the query and the database (target) amino acid sequences were as follows. Query start: 140; query end: 933; target start: 3; target end: 796. The percent of the query that aligns with the target is: 84%. The percent of the target that aligns with the query is: 99%.

[0553] SRPK2, SEQ ID NO: 36, SEQ ID NO: 102 encodes a protein that is 688 amino acids long. The results of a Smith-Waterman search of the NCBI non-redundant protein database with the amino acid sequence for this protein yielded the following results: P score=7.80E-183; number of matches: 684; percent identity over the alignment: 99%; percent similarity over the alignment: 99%; accession number for best hit: NP_{—}003129.1; description and species for best hit: (NM_{—}003138) SFRS protein kinase 2 [Homo sapiens]. The boundaries of the alignments for the query and the database (target) amino acid sequences were as follows. Query start: 1; query end: 688; target start: 1; target end: 686. The percent of the query that aligns with the target is: 99%. The percent of the target that aligns with the query is: 99%.

[0554] TLK1, SEQ ID NO: 37, SEQ ID NO: 103 encodes a protein that is 787 amino acids long. The results of a Smith-Waterman search of the NCBI non-redundant protein database with the amino acid sequence for this protein yielded the following results: P score=0; number of matches: 777; percent identity over the alignment: 98%; percent similarity over the alignment: 99%; accession number for best hit: NP 036422.1; description and species for best hit: (NM_{—}012290) tousled-like kinase 1; KIAA0137 gene product; serine threonine protein kinase [Homo sapiens]. The boundaries of the alignments for the query and the database (target) amino acid sequences were as follows. Query start: 1; query end: 787; target start: 1; target end: 787. The percent of the query that aligns with the target is: 98%. The percent of the target that aligns with the query is: 98%.

[0555] SGKO71, SEQ ID NO: 38, SEQ ID NO: 104 encodes a protein that is 632 amino acids long. The results of a Smith-Waterman-search of the NCBI non-redundant protein database with the amino acid sequence for this protein yielded the following results: P score=0.000001; number of matches: 63; percent identity over the alignment: 30%; percent similarity over the alignment: 50%; accession number for best hit: NP_{—}175853.1; description and species for best hit: Hypothetical protein [Arabidopsis thaliana]. The boundaries of the alignments for the query and the database (target) amino acid sequences were as follows. Query start: 25; query end: 228; target start: 1; target end: 197. The percent of the query that aligns with the target is: 9%. The percent of the target that aligns with the query is: 10%.

[0556] SK516, SEQ ID NO: 39, SEQ ID NO: 105 encodes a protein that is 929 amino acids long. The results of a Smith-Waterman search of the NCBI non-redundant protein database with the amino acid sequence for this protein yielded the following results: P score=5.70E-180; number of matches: 365; percent identity over the alignment: 100%; percent similarity over the alignment: 100%; accession number for best hit: BAA32317.1; description and species for best hit: KLAA0472 protein [Homo sapiens]. The boundaries of the alignments for the query and the database (target) amino acid sequences were as follows. Query start: 565; query end: 929; target start: 1; target end: 365. The percent of the query that aligns with the target is: 39%. The percent of the target that aligns with the query is: 100%.

[0557] H85389, SEQ ID NO: 40, SEQ ID NO: 106 encodes a protein that is 401 amino acids long. The results of a Smith-Waterman search of the NCBI non-redundant protein database with the amino acid sequence for this protein yielded the following results: P score=2.40E-162; number of matches: 400; percent identity over the alignment: 99%; percent similarity over the alignment: 99%; accession number for best hit: CAC10518.2; description and species for best hit: Novel protein kinase [Homo sapiens]. The boundaries of the alignments for the query and the database (target) amino acid sequences were as follows. Query start: 1; query end: 401; target start: 118; target end: 517. The percent of the query that aligns with the target is: 99%. The percent of the target that aligns with the query is: 77%.

[0558] Wee1b, SEQ ID NO: 41, SEQ ID NO: 107 encodes a protein that is 567 amino acids long. The results of a Smith-Waterman search of the NCBI non-redundant protein database with the amino acid sequence for this protein yielded the following results: P score=2.00E-287; number of matches: 541; percent identity over the alignment: 96%; percent similarity over the alignment: 96%; accession number for best hit: AAD04726.1; description and species for best hit: Similar to wee1-like protein kinase [Homo sapiens]. The boundaries of the alignments for the query and the database (target) amino acid sequences were as follows. Query start: 1; query end: 559;target start: 1; target end: 541. The percent of the query that aligns with the target is: 95%. The percent of the target that aligns with the query is: 100%.

[0559] Wnk2, SEQ ID NO: 42, SEQ ID NO: 108 encodes a protein that is 2245 amino acids long. The results of a Smith-Waterman search of the NCBI non-redundant protein database with the amino acid sequence for this protein yielded the following results: P score=0; number of matches: 1385; percent identity over the alignment: 99%; percent similarity over the alignment: 99%; accession number for best hit: BAB21851.1; description and species for best hit: KIAA1760 protein [Homo sapiens]. The boundaries of the alignments for the query and the database (target) amino acid sequences were as follows. Query start: 860; query end: 2245; target start: 1; target end: 1386. The percent of the query that aligns with the target is: 61%. The percent of the target that aligns with the query is: 99%.

[0560] MAP3K1, SEQ ID NO: 43, SEQ ID NO: 109 encodes a protein that is 1511 amino acids long. The results of a Smith-Waterman search of the NCBI non-redundant protein database with the amino acid sequence for this protein yielded the following results: P score=0; number of matches: 1459; percent identity over the alignment: 97%; percent similarity over the alignment: 97%; accession number for best hit: Q13233; description and species for best hit: MEKK 1 [Homo sapiens]. The boundaries of the alignments for the query and the database (target) amino acid sequences were as follows. Query start: 21; query end: 1511; target start: 2; target end: 1495. The percent of the query that aligns with the target is: 96%. The percent of the target that aligns with the query is: 97%.

[0561] MAP3K8, SEQ ID NO: 44, SEQ ID NO: 110 encodes a protein that is 735 amino acids long. The results of a Smith-Waterman search of the NCBI non-redundant protein database with the amino acid sequence for this protein yielded the following results: P score=2.80E-82; number of matches: 168; percent identity over the alignment: 100%; percent similarity over the alignment: 100%; accession number for best hit: XP_{—}017343.1; description and species for best hit: Hypothetical protein fragment FLJ23074 [Homo sapiens]. The boundaries of the alignments for the query and the database (target) amino acid sequences were as follows. Query start: 547; query end: 714; target start: 1; target end: 168. The percent of the query that aligns with the target is: 22%. The percent of the target that aligns with the query is: 100%.

[0562] Pak5_m, SEQ ID NO: 45 SEQ ID NO: 111 encodes a protein that is 593 amino acids long. The results of a Smith-Waterman search of the NCBI non-redundant protein database with the amino acid sequence for this protein yielded the following results: P score=2.70E-130; number of matches: 550; percent identity over the alignment: 92%; percent similarity over the alignment: 96%; accession number for best hit: NP_{—}005875.1; description and species for best hit: p21-activated kinase 4; protein kinase related to S. cerevisiae STE20, effector for Cdc42Hs [Homo sapiens]. The boundaries of the alignments for the query and the database (target) amino acid sequences were as follows. Query start: 1; query end: 593; target start: 1; target end: 591. The percent of the query that aligns with the target is: 92%. The percent of the target that aligns with the query is: 93%.

[0563] STLK6-rs, SEQ ID NO: 46 SEQ ID NO: 112 encodes a protein that is 418 amino acids long. The results of a Smith-Waterman search of the NCBI non-redundant protein database with the amino acid sequence for this protein yielded the following results: P score=5.90E-222; number of matches: 407; percent identity over the alignment: 97%; percent similarity over the alignment: 98%; accession number for best hit: NP_{—}061041.2; description and species for best hit: Amyotrophic lateral sclerosis 2 (juvenile) chromosome region, candidate 2 [Homo sapiens]. The boundaries of the alignments for the query and the database (target) amino acid sequences were as follows. Query start: 1; query end: 418; target start: 1; target end: 418. The percent of the query that aligns with the target is: 97%. The percent of the target that aligns with the query is: 97%.

[0564] MAP2K2, SEQ ID NO: 47 SEQ ID NO: 113 encodes a protein that is 381 amino acids long. The results of a Smith-Waterman search of the NCBI non-redundant protein database with the amino acid sequence for this protein yielded the following results: P score=4.80E-156; number of matches: 353; percent identity over the alignment: 92%; percent similarity over the alignment: 95%; accession number for best hit: NP_{—}109587.1; description and species for best hit: (NM_{—}030662) mitogen-activated protein kinase kinase 2; protein kinase, mitogen-activated, kinase 2, p45 (MAP kinase kinase 2) [Homo sapiens]. The boundaries of the alignments for the query and the database (target) amino acid sequences were as follows. Query start: 2; query end: 380; target start: 1′; target end: 380. The percent of the query that aligns with the target is: 92%. The percent of the target that aligns with the query is: 88%.

[0565] CCK4, SEQ ID NO: 48 SEQ ID NO: 114 encodes a protein that is 1070 amino acids long. The results of a Smith-Waterman search of the NCBI non-redundant protein database with the amino acid sequence for this protein yielded the following results: P score=0; number of matches: 1069; percent identity over the alignment: 99%; percent similarity over the alignment: 100%; accession number for best hit: JC4593; description and species for best hit: protein-tyrosine kinase-related receptor PTK7 precursor [Homo sapiens]. The boundaries of the alignments for the query and the database (target) amino acid sequences were as follows. Query start: 1; query end: 1070; target start: 1; target end: 1070. The percent of the query that aligns with the target is: 99%. The percent of the target that aligns with the query is: 99%.

[0566] LMR1, SEQ ID NO: 49 SEQ ID NO: 115 encodes a protein that is 1374 amino acids long. The results of a Smith-Waterman search of the NCBI non-redundant protein database with the amino acid sequence for this protein yielded the following results: P score=0; number of matches: 1207; percent identity over the alignment: 100%; percent similarity over the alignment: 100%; accession number for best hit: NP_{—}004911.1; description and species for best hit: (NM_{—}004920) apoptosis-associated tyrosine kinase [Homo sapiens]. The boundaries of the alignments for the query and the database (target) amino acid sequences were as follows. Query start: 168; query end: 1374; target start: 1; target end: 1207. The percent of the query that aligns with the target is: 87%. The percent of the target that aligns with the query is: 100%.

[0567] RYK, SEQ ID NO: 50 SEQ ID NO: 116 encodes a protein that is 607 amino acids long. The results of a Smith-Waterman search of the NCBI non-redundant protein database with the amino acid sequence for this protein yielded the following results: P score=3.60E-287; number of matches: 603; percent identity over the alignment: 99%; percent similarity over the alignment: 99%; accession number for best hit: 137560; description and species for best hit: Protein-tyrosine kinase Ryk-[Homo sapiens]. The boundaries of the alignments for the query and the database (target) amino acid sequences were as follows. Query start: 1; query end: 607; target start: 1; target end: 607. The percent of the query that aligns with the target is: 99%. The percent of the target that aligns with the query is: 99%.

[0568] LRRK2, SEQ ID NO: 51 SEQ ID NO: 117 encodes a protein that is 2534 amino acids long. The results of a Smith-Waterman search of the NCBI non-redundant protein database with the amino acid sequence for this protein yielded the following results: P score=7.90E-189; number of matches: 463; percent identity over the alignment: 84%; percent similarity over the alignment: 92%; accession number for best hit: NP_{—}080006.1; description and species for best hit: RIKEN cDNA 4921513020 gene [Mus musculus]. The boundaries of the alignments for the query and the database (target) amino acid sequences were as follows. Query start: 1990; query end: 2534; target start: 17; target end: 561. The percent of the query that aligns with the target is: 18%. The percent of the target that aligns with the query is: 82%.

[0569] pMLK4, SEQ ID NO: 52 SEQ ID NO: 118 encodes a protein that is 1036 amino acids long. The results of a Smith-Waterman search of the NCBI non-redundant protein database with the amino acid sequence for this protein yielded the following results: P score=0; number of matches: 1027; percent identity over the alignment: 99%; percent similarity over the alignment: 99%; accession number for best hit: CAC84640.1; description and species for best hit: (AJ311798) mixed lineage kinase 4 beta [Homo sapiens]. The boundaries of the alignments for the query and the database (target) amino acid sequences were as follows. Query start: 1; query end: 1036; target start: 1; target end: 1036. The percent of the query that aligns with the target is: 99%. The percent of the target that aligns with the query is: 99%.

[0570] KSR, SEQ ID NO: 53 SEQ ID NO: 119 encodes a protein that is 901 amino acids long. The results of a Smith-Waterman search of the NCBI non-redundant protein database with the amino acid sequence for this protein yielded the following results: P score=3.30E-269; number of matches: 797; percent identity over the alignment: 88%; percent similarity over the alignment: 92%; accession number for best hit: NP_{—}038599.1; description and species for best hit: (NM_{—}013571) kinase suppressor of ras [Mus musculus]. The boundaries of the alignments for the query and the database (target) amino acid sequences were as follows. Query start: 1; query end: 901; target start: 1; target end: 873. The percent of the query that aligns with the target is: 88%. The percent of the target that aligns with the query is: 91%.

[0571] KSR2, SEQ ID NO: 54 SEQ ID NO: 120 encodes a protein that is 982 amino acids long. The results of a Smith-Waterman search of the NCBI non-redundant protein database with the amino acid sequence for this protein yielded the following results: P score=9.60E-119; number of matches: 452; percent identity over the alignment: 48%; percent similarity over the alignment: 62%; accession number for best hit: NP 038599.1; description and species for best hit: (NM_{—}013571) kinase suppressor of ras [Mus musculus]. The boundaries of the alignments for the query and the database (target) amino acid sequences were as follows. Query start: 51; query end: 982; target start: 34; target end: 849. The percent of the query that aligns with the target is: 46%. The percent of the target that aligns with the query is: 51%.

[0572] KLAA1646, SEQ ID NO: 55 SEQ ID NO: 121 encodes a protein that is 537 amino acids long. The results of a Smith-Waterman search of the NCBI non-redundant protein database with the amino acid sequence for this protein yielded the following results: P score=0; number of matches: 481; percent identity over the alignment: 100%; percent similarity over the alignment: 100%; accession number for best hit: BAB33316.1; description and species for best hit: KIAA1646 protein [Homo sapiens]. The boundaries of the alignments for the query and the database (target) amino acid sequences were as follows. Query start: 57; query end: 537; target start: 1; target end: 481. The percent of the query that aligns with the target is: 89%. The percent of the target that aligns with the query is: 100%.

[0573] DGK-beta, SEQ ID NO: 56 SEQ ID NO: 122 encodes a protein that is 804 amino acids long. The results of a Smith-Waterman search of the NCBI non-redundant protein database with the amino acid sequence for this protein yielded the following results: P score=0; number of matches: 804; percent identity over the alignment: 100%; percent similarity over the alignment: 100%; accession number for best hit: Q9Y6T7; description and species for best hit: Diacylglycerol kinase, bets (DGK-BETA) [Homo sapiens]. The boundaries of the alignments for the query and the database (target) amino acid sequences were as follows. Query start: 1; query end: 804; target start: 1; target end: 804. The percent of the query that aligns with the target is: 100%. The percent of the target that aligns with the query is: 100%.

[0574] IP6K1, SEQ ID NO: 57 SEQ ID NO: 123 encodes a protein that is 441 amino acids, long. The results of a Smith-Waterman search of the NCBI non-redundant protein database with the amino acid sequence for this protein yielded the following results: P score=1.60E-257; number of matches: 441; percent identity over the alignment: 100%; percent similarity over the alignment: 100%; accession number for best hit: BAA13393.2; description and species for best hit: KLAA0263 protein [Homo sapiens]. The boundaries of the alignments for the query and the database (target) amino acid sequences were as follows. Query start: 1; query end: 441; target start: 22; target end: 462. The percent of the query that aligns with the target is: 100%. The percent of the target that aligns with the query is: 95%.

[0575] YAB1, SEQ ID NO: 58 SEQ ID NO: 124 encodes a protein that is 647 amino acids long. The results of a Smith-Waterman search of the NCBI non-redundant protein database with the amino acid sequence for this protein yielded the following results: P score=3.80E-244; number of matches: 368; percent identity over the alignment: 100%; percent similarity over the alignment: 100%; accession number for best hit: NP_{—}064632.1; description and species for best hit: (NM_{—}020247) chaperone, ABC1 activity of bc1 complex like [Homo sapiens]. The boundaries of the alignments for the query and the database (target) amino acid sequences were as follows. Query start: 280; query end: 647; target start: 1; target end: 368. The percent of the query that aligns with the target is: 56%. The percent of the target that aligns with the query is: 100%.

[0576] AF052122, SEQ ID NO; 59 SEQ ID NO: 125 encodes a protein that is 591 amino acids long. The results of a Smith-Waterman search of the NCBI non-redundant protein database with the amino acid sequence for this protein yielded the following results: P score=1.20E-246; number of matches: 385; percent identity over the alignment: 99%; percent similarity over the alignment: 100%; accession number for best hit: AAH13114.1; description and species for best hit: Hypothetical protein [Homo sapiens]. The boundaries of the alignments for the query and the database (target) amino acid sequences were as follows. Query start: 206; query end: 591; target start: 1; target end: 386. The percent of the query that aligns with the target is: 65%. The percent of the target that aligns with the query is: 99%.

[0577] AAF23326, SEQ ID NO: 60 SEQ ID NO: 126 encodes a protein that is 455 amino acids long. The results of a Smith-Waterman search of the NCBI non-redundant protein database with the amino acid sequence for this protein yielded the following results: P score=1.40E-304; number of matches: 455; percent identity over the alignment: 100%; percent similarity over the alignment: 100%; accession number for best hit: NP_{—}065154.1; description and species for best hit: Hypothetical protein [Homo sapiens]. The boundaries of the alignments for the query and the database (target) amino acid sequences were as follows. Query start: 1; query end: 455; target start: 1; target end: 455. The percent of the query that aligns with the target is: 100%. The percent of the target that aligns with the query is: 100%.

[0578] SGK493, SEQ ID NO: 61 SEQ ID NO: 127 encodes a protein that is 552 amino acids long. The results of a Smith-Waterman search of the NCBI non-redundant protein database with the amino acid sequence for this protein yielded the following results: P score=0; number of matches: 552; percent identity over the alignment: 100%; percent similarity over the alignment: 100%; accession number for best hit: NP_{—}060813.1; description and species for best hit: Hypothetical protein FLJ11159 [Homo sapiens]. The boundaries of the alignments for the query and the database (target) amino acid sequences were as follows. Query start: 1; query end: 552; target start: 1; target end: 552. The percent of the query that aligns with the target is: 100%. The percent of the target that aligns with the query is: 100%.

[0579] BRD2, SEQ ID NO: 62 SEQ ID NO: 128 encodes a protein that is 801 amino acids long. The results of a Smith-Waterman search of the NCBI non-redundant protein database with the amino acid sequence for this protein yielded the following results: P score=2.60E-256; number of matches: 801; percent identity over the alignment: 100%; percent similarity over the alignment: 100%; accession number for best hit: NP_{—}005095.1; description and species for best hit: Bromodomain-containing protein-2; female sterile homeotic-related gene 1 [Homo sapiens]. The boundaries of the alignments for the query and the database (target) amino acid sequences were as follows. Query start: 1; query end: 801; target start: 1; target end: 801. The percent of the query that aligns with the target is: 100%. The percent of the target that aligns with the query is: 100%.

[0580] BRD3, SEQ ID NO: 63, SEQ ID NO: 129 encodes a protein that is 726 amino acids long. The results of a Smith-Waterman search of the NCBI non-redundant protein database with the amino acid sequence for this protein yielded the following results: P score=2.20E-243; number of matches: 726; percent identity over the alignment: 100%; percent similarity over the alignment: 100%; accession number for best hit: NP_{—}031397.1; description and species for best hit: Bromodomain-containing protein 3 [Homo sapiens]. The boundaries of the alignments for the query and the database (target) amino acid sequences were as follows. Query start: 1; query end: 726; target start: 1; target end: 726. The percent of the query that aligns with the target is: 100%. The percent of the target that aligns with the query is: 100%.

[0581] BRD4, SEQ ID NO: 64, SEQ ID NO: 130 encodes a protein that is 722 amino acids long. The results of a Smith-Waterman search of the NCBI non-redundant protein database with the amino acid sequence for this protein yielded the following results: P score=2.60E-232; number of matches: 722; percent identity over the alignment: 100%; percent similarity over the alignment: 100%; accession number for best hit: NP_{—}055114.1; description and species for best hit: Bromodomain-containing protein 4 [Homo sapiens]. The boundaries of the alignments for the query and the database (target) amino acid sequences were as follows. Query start: 1; query end: 722; target start: 1; target end: 722. The percent of the query that aligns with the target is: 100%. The percent of the target that aligns with the query is: 100%.

[0582] BRDT, SEQ ID NO: 65, SEQ ID NO: 131 encodes a protein that is 947 amino acids long. The results of a Smith-Waterman search of the NCBI non-redundant protein database with the amino acid sequence for this protein yielded the following results: P score=0; number of matches: 947; percent identity over the alignment: 100%; percent similarity over the alignment: 100%; accession number for best hit: NP_{—}001717.1; description and species for best hit: Testis-specific bromodomain protein [Homo sapiens]. The boundaries of the alignments for the query and the database. (target) amino acid sequences were as follows. Query start: 1; query end: 947; target start: 1; target end: 947. The percent of the query that aligns with the target is: 100%. The percent of the target that aligns with the query is: 100%.

[0583] ZC1, SEQ ID NO: 66, SEQ ID NO: 132 encodes a protein that is 1392 amino acids long. It has multiple splice variants, as described above in the Nucleic Acids description section. The results of a Smith-Waterman search of the NCBI non-redundant protein database with the amino acid sequence for this protein yielded the following results: P score=0; number of matches: 1202; percent identity over the alignment: 86%; percent similarity over the alignment: 87%; accession number for best hit: NP_{—}032722; description and species for best hit: NCK interacting kinase; HPK/GCK-like kinase [Mus musculus]. The boundaries of the alignments for the query and the database (target) amino acid sequences were as follows. Query start: 1; query end: 1392; target start: 1; target end: 12433. The percent of the query that aligns with the target is: 87%. The percent of the target that aligns with the query is: 98%.

Domains of Predicted Proteins (Table 4)

[0584] Many protein kinases contain modular domains in addition to the protein kinases domain. These extra-catalytic domains may play key roles in regulating the activity, protein-protein interactions, and sub-cellular localization of the protein. The paragraphs below describe in detail the protein domains found within the patent sequences. These domains were identified using PFAM (http://pfam.wustl.edu/hmmsearch.shtml) models, a large collection of multiple sequence alignments and hidden Markov models covering many common protein domains. Version Pfam 7.3 (May 2002) contains alignments and models for 3849 protein families. The PFAM alignments were downloaded from http://pfam.wustl.edu/hmmsearch.shtml and the HMMr searches were run locally on a Timelogic computer (TimeLogic Corporation, Incline Village, Nev.).

Results:

[0585] CRIK, SEQ ID NO: 1, SEQ ID NO: 67, has a Protein kinase domain, (PFAM profile accession # PF00069), identified with P_score 9.20E-67. The domain starts at amino acid 98 and ends at amino acid 361. The profile has a length of 278 amino acids. The regions of the profile that recognized the domain within the protein were from “profile start” residue number 1 to “profile end” residue number 278.

[0586] CRIK, SEQ ID NO: 1, SEQ ID NO: 67, has a CNH domain, (PFAM profile accession # PF00780), identified with P_score 2.60E-115. The domain starts at amino acid 1620 and ends at amino acid 1917. The profile has a length of 378 amino acids. The regions of the profile that recognized the domain within the protein were from “profile start” residue number 1 to “profile end” residue number 378.

[0587] CRIK, SEQ ID NO: 1, SEQ ID NO: 67, has a PH domain, (PFAM profile accession # PF00169), identified with P_score 3.00E-16. The domain starts at amino acid 1472 and ends at amino acid 1591. The profile has a length of 85 amino acids. The regions of the profile that recognized the domain within the protein were from “profile start” residue number 1 to “profile end” residue number 85.

[0588] CRIK, SEQ ID NO: 1, SEQ ID NO: 67, has a Phorbol esters/diacylglycerol binding domain (C1 domain), (PFAM profile accession # PF00130), identified with P_score 1.00E-09. The domain starts at amino acid 1391 and ends at amino acid 1439. The profile has a length of 51 amino acids. The regions of the profile that recognized the domain within the protein were from “profile start” residue number 1 to “profile end” residue number 51.

[0589] CRIK, SEQ ID NO: 1, SEQ ID NO: 67, has a Protein kinase C terminal domain, (PFAM profile accession # PF00433), identified with P_score 3.00E-08. The domain starts at amino acid 362 and ends at amino acid 391. The profile has a length of 70 amino acids. The regions of the profile that recognized the domain within the protein were from “profile start” residue number 1 to “profile end” residue number 32.

[0590] DMPK2, SEQ ID NO: 2, SEQ ID NO: 68, has a Protein kinase domain, (PFAM profile accession # PF00069), identified with P score=2.10E-70. The domain starts at amino acid 71 and ends at amino acid 337. The profile has a length of 278 amino acids. The regions of the profile that recognized the domain within the protein were from “profile start” residue number 1 to “profile end” residue number 278.

[0591] DMPK2, SEQ ID NO: 2, SEQ ID NO: 68, has a Phorbol esters/diacylglycerol binding domain (C1 domain), (PFAM profile accession # PF00130), identified with P_score 3.10E-17. The domain starts at amino acid 887 and ends at amino acid 935. The profile has a length of 51 amino acids. The regions of the profile that recognized the domain within the protein were from “profile start” residue number 1 to “profile end” residue number 51.

[0592] DMPK2, SEQ ID NO: 2, SEQ ID NO: 68, has a PH domain, (PFAM profile accession # PF00169), identified with P_score 1.70E-16. The domain starts at amino acid 956 and ends at amino acid 1074. The profile has a length of 85 amino acids. The regions of the profile that recognized the domain within the protein were from “profile start” residue number 1 to “profile end” residue number 85.

[0593] DMPK2, SEQ ID NO: 2, SEQ ID NO: 68, has a CNH domain, (PFAM profile accession # PF00780), identified with P score=1.50E-12. The domain starts at amino acid 1100 and ends at amino acid 1380. The profile has a length of 378 amino acids. The regions of the profile that recognized the domain within the protein were from “profile start” residue number 1 to “profile end” residue number 378.

[0594] DMPK2, SEQ ID NO: 2, SEQ ID NO: 68, has a Protein kinase C terminal domain, (PFAM profile accession #.PF00433), identified with P_score 2.00E-08. The domain starts at amino acid 351 and ends at amino acid 366. The profile has a length of 70 amino acids. The regions of the profile that recognized the domain within the protein were from “profile start” residue number 16 to “profile end” residue number 31.

[0595] MAST3, SEQ ID NO: 3, SEQ ID NO: 69, has a Protein kinase domain, (PFAM profile accession # PF00069), identified with P-score 5.50E-74. The domain starts at amino acid 389 and ends at amino acid 535. The profile has a length of 294 amino acids. The regions of the profile that recognized the domain within the protein were from “profile start” residue number 1 to “profile end” residue number 149.

[0596] MAST3, SEQ ID NO: 3, SEQ ID NO: 69, has a Protein kinase domain, (PFAM profile accession # PF00069), identified with P_score 5.50E-74. The domain starts at amino acid 560 and ends at amino acid 662. The profile has a length of 294 amino acids. The regions of the profile that recognized the domain within the protein were from “profile start” residue number 158 to “profile end” residue number 294.

[0597] MAST3, SEQ ID NO: 3, SEQ ID NO: 69, has a PDZ domain, (PFAM profile accession # PF00595), identified with P_score 3.70E-09. The domain starts at amino acid 972 and ends at amino acid 1054. The profile has a length of 84 amino acids. The regions of the profile that recognized the domain within the protein were from “profile start” residue number 1 to “profile end” residue number 79.

[0598] MAST205, SEQ ID NO: 4, SEQ ID NO: 70, has a Protein kinase domain, (PFAM profile accession # PF00069), identified with P_score 7.90E-80. The domain starts at amino acid 512 and ends at amino acid 785. The profile has a length of 278 amino acids. The regions of the profile that recognized the domain within the protein were from “profile start” residue number 1 to “profile end” residue number 278.

[0599] MAST205, SEQ ID NO: 4, SEQ ID NO: 70, has a PDZ domain (Also known as DHR or GLGF)., (PFAM profile accession # PF00595), identified with P score=2.20E-10. The domain starts at amino acid 1104 and ends at amino acid 1191. The profile has a length of 83 amino acids. The regions of the profile that recognized the domain within the protein were from “profile start” residue number 1 to “profile end” residue number 83.

[0600] MASTL, SEQ ID NO: 5, SEQ ID NO: 71, has a Protein kinase domain, (PFAM profile accession # PF00069), identified with P_score 2.20E-73. The domain starts at amino acid 35 and ends at amino acid 310. The profile has a length of 278 amino acids. The regions of the profile that recognized the domain within the protein were from “profile start” residue number 1 to “profile end” residue number 278.

[0601] MASTL, SEQ ID NO: 5, SEQ ID NO: 71, has a Protein kinase domain, (PFAM profile accession # PF00069), identified with P_score 2.20E-73. The domain starts at amino acid 739 and ends at amino acid 834. The profile has a length of 278 amino acids. The regions of the profile that recognized the domain within the protein were from “profile start” residue number 149 to “profile end” residue number 278.

[0602] MASTL, SEQ ID NO: 5, SEQ ID NO: 71, has a Protein kinase C terminal domain, (PFAM profile accession # PF00433), identified with P_score 4.60E-07. The domain starts at amino acid 835 and ends at amino acid 863. The profile has a length of 70 amino acids. The regions of the profile that recognized the domain within the protein were from “profile start” residue number 1 to “profile end” residue number 31.

[0603] PKC_eta, SEQ ID NO: 6, SEQ ID NO: 72, has a Protein kinase domain, (PFAM profile accession # PF00069), identified with P_score 3.60E-82. The domain starts at amino acid 355 and ends at amino acid 614. The profile has a length of 294 amino acids. The regions of the profile that recognized the domain within the protein were from “profile start” residue number 1 to “profile end” residue number 294.

[0604] PKC eta, SEQ ID NO: 6, SEQ ID NO: 72, has a Phorbol esters/diacylglycerol binding domain (C1 domain), (PFAM profile accession # PF00130), identified with P score=4.40E-46. The domain starts at amino acid 172 and ends at amino acid 222. The profile has a length of 51 amino acids. The regions of the profile that recognized the domain within the protein were from “profile start” residue number 1 to “profile end” residue number 51.

[0605] PKC_eta, SEQ ID NO: 6, SEQ ID NO: 72, has a Phorbol esters/diacylglycerol binding domain (C1 domain), (PFAM profile accession # PF00130), identified with P_score 4.40E-46. The domain starts at amino acid 246 and ends at amino acid 295. The profile has a length of 51 amino acids. The regions of the profile that recognized the domain within the protein were from “profile start” residue number 1 to “profile end” residue number 51.

[0606] PKC_eta; SEQ ID NO: 6, SEQ ID NO: 72, has a Protein kinase C terminal domain, (PFAM profile accession # PF00433), identified with P score=1.80E-41. The domain starts at amino acid 615 and ends at amino acid 681. The profile has a length of 70 amino acids. The regions of the profile that recognized the domain within the protein were from “profile start” residue number 1 to “profile end” residue number 70.

[0607] H19102, SEQ ID NO: 7, SEQ ID NO: 73, has a Protein kinase domain, (PFAM profile accession # PF00069), identified with P_score 3.20E-64. The domain starts at amino acid 146 and ends at amino acid 398. The profile has a length of 278 amino acids. The regions of the profile that recognized the domain within the protein were from “profile start” residue number 1 to “profile end” residue number 278.

[0608] MSK1, SEQ ID NO: 8, SEQ ID NO: 74, has a Protein kinase domain, (PFAM profile accession # PF00069), identified with P_score 1.60E-182. The domain starts at amino acid 49 and ends at amino acid 318. The profile has a length of 278 amino acids. The regions of the profile that recognized the domain within the protein were from “profile start” residue number 1 to “profile end” residue number 278.

[0609] MSK1, SEQ ID NO: 8, SEQ ID NO: 74, has a Protein kinase domain, (PFAM profile accession # PF00069), identified with P_score 1.60E-182. The domain starts at amino acid 427 and ends at amino acid 687. The profile has a length of 278 amino acids. The regions of the profile that recognized the domain within the protein were from “profile start” residue number 2 to “profile end” residue number 278.

[0610] MSK1, SEQ ID NO: 8, SEQ ID NO: 74, has a Protein kinase C terminal domain, (PFAM profile accession # PF00433), identified with P_score 2.40E-21. The domain starts at amino acid 319 and ends at amino acid 382. The profile has a length of 70 amino acids. The regions of the profile that recognized the domain within the protein were from “profile start” residue number 1 to “profile end” residue number 70.

[0611] YANK3, SEQ ID NO: 9, SEQ ID NO: 75, has a Protein kinase domain, (PFAM profile accession # PF00069), identified with P_score 3.80E-71. The domain starts at amino acid 93 and ends at amino acid 345. The profile has a length of 294 amino acids. The regions of the profile that recognized the domain within the protein were from “profile start” residue number 1 to “profile end” residue number 287.

[0612] MARK2, SEQ ID NO: 10, SEQ ID NO: 76, has a Protein kinase domain, (PFAM profile accession # PF00069), identified with P_score 1.30E-100. The domain starts at amino acid 53 and ends at amino acid 304. The profile has a length of 294 amino acids. The regions of the profile that recognized the domain within the protein were from “profile start” residue number 1 to “profile end” residue number 294.

[0613] MARK2, SEQ ID NO: 10, SEQ ID NO: 76, has a Kinase associated domain 1, (PFAM profile accession # PF02149), identified with P_score 3.00E-21. The domain starts at amino acid 738 and ends at amino acid 787. The profile has a length of 50 amino acids. The regions of the profile that recognized the domain within the protein were from “profile start” residue number 1 to “profile end” residue number 50.

[0614] MARK2, SEQ ID NO: 10, SEQ ID NO: 76, has a UBA/TS-N domain, (PFAM profile accession # PF00627), identified with P_score 0.000003. The domain starts at amino acid 324 and ends at amino acid 363. The profile has a length of 45 amino acids. The regions of the profile that recognized the domain within the protein were from “profile start” residue number 1 to “profile end” residue number 45.

[0615] NuaK2, SEQ ID NO: 11, SEQ ID NO: 77, has a Protein kinase domain, (PFAM profile accession # PF00069), identified with P_score 8.00E-94. The domain starts at amino acid 97 and ends at amino acid 347. The profile has a length of 294 amino acids. The regions of the profile that recognized the domain within the protein were from “profile start” residue number 1 to “profile end” residue number 294.

[0616] BRSK2, SEQ ID NO: 12, SEQ ID NO: 78, has a Protein kinase domain, (PFAM profile accession # PF00069), identified with P_score 3.20E-97. The domain starts at amino acid 19 and ends at amino acid 270. The profile has a length of 278 amino acids. The regions of the profile that recognized the domain within the protein were from “profile start” residue number 1 to “profile end” residue number 278.

[0617] MARK4, SEQ ID NO: 13, SEQ ID NO: 79, has a Protein kinase domain, (PFAM profile accession # PF00069), identified with P_score 7.70E-104. The domain starts at amino acid 59 and ends at amino acid 310. The profile has a length of 278 amino acids. The regions of the profile that recognized the domain within the protein were from “profile start” residue number 1 to “profile end” residue number 278.

[0618] MARK4, SEQ ID NO: 13, SEQ ID NO: 79, has a Kinase associated domain 1, (PFAM profile accession # PF02149), identified with P_score 1.30E-15. The domain starts at amino acid 703 and ends at amino acid 752. The profile has a length of 50 amino acids. The regions of the profile that recognized the domain within the protein were from “profile start” residue number 1 to “profile end” residue number 50.

[0619] MARK4, SEQ ID NO: 13, SEQ ID NO: 79, has a UBA domain, (PFAM profile accession # PF00627), identified with P_score 6.30E-11. The domain starts at amino acid 330 and ends at amino acid 3.68. The profile has a length of 41 amino acids. The regions of the profile that recognized the domain within the protein were from “profile start” residue number 1 to “profile end” residue number 41.

[0620] DCAMKL2, SEQ ID NO: 14, SEQ ID NO: 80, has a Protein kinase domain, (PFAM profile accession # PF00069), identified with P score=1.70E-97. The domain starts at amino acid 394 and ends at amino acid 651. The profile has a length of 278 amino acids. The regions of the profile that recognized the domain within the protein were from “profile start” residue number 1 to “profile end” residue number 278.

[0621] PIM2, SEQ ID NO: 15, SEQ ID NO: 81, has a Protein kinase domain, (PFAM profile accession # PF00069), identified with P_score 1.40E-71. The domain starts at amino acid 132 and ends at amino acid 386. The profile has a length of 294 amino acids. The regions of the profile that recognized the domain within the protein were from “profile start” residue number 1 to “profile end” residue number 294.

[0622] PIM3, SEQ ID NO: 16, SEQ ID NO: 82, has a Protein kinase domain, (PFAM profile accession # PF00069), identified with P_score 9.90E-80. The domain starts at amino acid 40 and ends at amino acid 293. The profile has a length of 278 amino acids. The regions of the profile that recognized the domain within the protein were from “profile start” residue number 1 to “profile end” residue number 278.

[0623] TSSK4, SEQ ID NO: 17, SEQ ID NO: 83, has a Protein kinase domain, (PFAM profile accession # PF00069), identified with P_score 1.10E-78. The domain starts at amino acid 25 and ends at amino acid 293. The profile has a length of 278 amino acids. The regions of the profile that recognized the domain within the protein were from “profile start” residue number 1 to “profile end” residue number 278.

[0624] CKIL2, SEQ ID NO: 18, SEQ ID NO: 84, has a Protein kinase domain, (PFAM profile accession # PF00069), identified with P_score 8.50E-33. The domain starts at amino acid 21 and ends at amino, acid 276. The profile has a length of 278 amino acids. The regions of the profile that recognized the domain within the protein were from “profile start” residue number 1 to “profile end” residue number 265.

[0625] PCTAIRE3, SEQ ID NO: 19, SEQ ID NO: 85, has a Protein kinase domain, (PFAM profile accession # PF00069), identified with P_score 1.20E-87. The domain starts at amino acid 50 and ends at amino acid 331. The profile has a length of 278 amino acids. The regions of the profile that recognized the domain within the protein were from “profile start” residue number 1 to “profile end” residue number 278.

[0626] PFTAIRE2, SEQ ID NO: 20, SEQ ID NO: 86, has a Protein kinase domain, (PFAM profile accession # PF00069), identified with P_score 4.40E-80. The domain starts at amino acid 103 and ends at amino acid 387. The profile has a length of 278 amino acids. The regions of the profile that recognized the domain within the protein were from “profile start” residue number 1 to “profile end” residue number 278.

[0627] ERK7, SEQ ID NO: 21, SEQ ID NO: 87, has a Protein kinase domain, (PFAM profile accession # PF00069), identified with P_score 4.80E-90. The domain starts at amino acid 13 and ends at amino acid 323. The profile has a length of 278 amino acids. The regions of the profile that recognized the domain within the protein were from “profile start” residue number 1 to “profile end” residue number 278.

[0628] CKIIa-rs, SEQ ID NO: 22, SEQ ID NO: 88, has a Protein kinase domain, (PFAM profile accession # PF00069), identified with P_score 2.20E-89. The domain starts at amino acid 39 and ends at amino acid 324. The profile has a length of 278 amino acids. The regions of the profile that recognized the domain within the protein were from “profile start” residue number 1 to “profile end” residue number 278.

[0629] DYRK4, SEQ ID NO: 23, SEQ ID NO: 89, has a Protein kinase domain, (PFAM profile accession # PF00069), identified with P_score 4.00E-64. The domain starts at amino acid 506 and ends at amino acid 802. The profile has a length of 278 amino acids. The regions of the profile that recognized the domain within the protein were from “profile start” residue number 1 to “profile end” residue number 278.

[0630] HIPK1, SEQ ID NO: 24, SEQ ID NO: 90, has a Protein kinase domain, (PFAM profile accession # PF00069), identified with P_score 6.20E-58. The domain starts at amino acid 190 and ends at amino acid 518. The profile has a length of 278 amino acids. The regions of the profile that recognized the domain within the protein were from “profile-start” residue number 1 to “profile end” residue number 278.

[0631] HIPK4, SEQ ID NO: 25, SEQ ID NO: 91, has a Protein kinase domain, (PFAM profile accession # PF00069), identified with P_score 1.10E-58. The domain starts at amino acid 11 and ends at amino acid 347. The profile has a length of 278 amino acids. The regions of the profile that recognized the domain within the protein were from “profile start” residue number 1 to “profile end” residue number 278.

[0632] BIKE, SEQ ID NO: 26, SEQ ID NO: 92, has a Protein kinase domain, (PFAM profile accession # PF00069), identified with P_score 2.50E-38. The domain starts at amino acid 51 and ends at amino acid 314. The profile has a length of 294 amino acids. The regions of the profile that recognized the domain within the protein were from “profile start” residue number 1 to “profile end” residue number 294.

[0633] NEK10, SEQ ID NO: 27, SEQ ID NO: 93, has a Protein kinase domain, (PFAM profile accession # PF00069), identified with P_score 8.80E-70. The domain starts at amino acid 519 and ends at amino acid 783. The profile has a length of 294 amino acids. The regions of the profile that recognized the domain within the protein were from “profile start” residue number 1 to “profile end” residue number 294.

[0634] NEK10, SEQ ID NO: 27, SEQ ID NO: 93, has a Armadillo/beta-catenin-like repeat, (PFAM profile accession # PF00514), identified with P_score 0.009707. The domain starts at amino acid 198 and ends at amino acid 238. The profile has a length of 40 amino acids. The regions of the profile that recognized the domain within the protein were from “profile start” residue number 1 to “profile end” residue number 40.

[0635] NEK10, SEQ ID NO: 27, SEQ ID NO: 93, has a Armadillo/beta-catenin-like repeat, (PFAM profile accession # PF00514), identified with P_score 0.009707. The domain starts at amino acid 239 and ends at amino acid 279. The profile has a length of 40 amino acids. The regions of the profile that recognized the domain within the protein were from “profile start” residue number 1 to “profile end” residue number 40.

[0636] NEK10, SEQ ID NO: 27, SEQ ID NO: 93, has a Armadillo/beta-catenin-like repeat, (PFAM profile accession # PF00514), identified with P_score 0.009707. The domain starts at amino acid 280 and ends at amino acid 320. The profile has a length of 40 amino acids. The regions of the profile that recognized the domain within the protein were from “profile start” residue number 1 to “profile end” residue number 40.

[0637] pNEK5, SEQ ID NO: 28, SEQ ID NO: 94, has a Protein kinase domain, (PFAM profile accession # PF00069), identified with P_score 9.10E-87. The domain starts at amino acid 61 and ends at amino acid 316. The profile has a length of 294 amino acids. The regions of the profile that recognized the domain within the protein were from “profile start” residue number 1 to “profile end” residue number 294.

[0638] NEK1, SEQ ID NO: 29, SEQ ID NO: 95, has a Protein kinase domain, (PFAM profile accession # PF00069), identified with P_score 2.50E-89. The domain starts at amino acid 4 and ends at amino acid 258. The profile has a length of 278 amino acids. The regions of the profile that recognized the domain within the protein were from “profile start” residue number 1 to “profile end” residue number 278.

[0639] NEK3, SEQ ID NO: 30, SEQ ID NO: 96, has a Protein kinase domain, (PFAM profile accession # PF00069), identified with P_score 5.60E-92. The domain starts at amino acid 4 and ends at amino acid 257. The profile has a length of 278 amino acids. The regions of the profile that recognized the domain within the protein were from “profile start” residue number 1 to “profile end” residue number 278.

[0640] SGK069, SEQ ID NO: 31, SEQ ID NO: 97, has a Protein kinase domain, (PFAM profile accession # PF00069), identified with P_score 3.80E-40. The domain starts at amino acid 62 and ends at amino acid 325. The profile has a length of 278 amino acids. The regions of the profile that recognized the domain within the protein were from “profile start” residue number 1 to “profile end” residue number 263.

[0641] SGK110, SEQ ID NO: 32, SEQ ID NO: 98, has a Protein kinase domain, (PFAM profile accession # PF00069), identified with P_score 1.70E-39. The domain starts at amino acid 98 and ends at amino acid 359. The profile has a length of 278 amino acids. The regions of the profile that recognized the domain within the protein were from “profile start” residue number 1 to “profile end” residue number 273.

[0642] NRBP2, SEQ ID NO: 33, SEQ ID NO: 99, has a Protein kinase domain, (PFAM profile accession # PF00069), identified with P score=2.00E-24. The domain starts at amino acid 38 and ends at amino acid 313. The profile has a length of 278 amino acids. The regions of the profile that recognized the domain within the protein were from “profile start” residue number 1 to “profile end” residue number 278.

[0643] CNK, SEQ ID NO: 34, SEQ ID NO: 100, has a Protein kinase domain, (PFAM profile accession # PF00069), identified with P_score 1.60E-91. The domain starts at amino acid 62 and ends at amino acid 314. The profile has a length of 278 amino acids. The regions of the profile that recognized the domain within the protein were from “profile start” residue number 1 to “profile end” residue number 278.

[0644] CNK, SEQ ID NO: 34, SEQ ID NO: 100, has a POLO box duplicated region, (PFAM profile accession # PF00659), identified with P_score 9.70E-35. The domain starts at amino acid 470 and ends at amino acid 533. The profile has a length of 77 amino acids. The regions of the profile that recognized the domain within the protein were from “profile start” residue number 1 to “profile end” residue number 77.

[0645] CNK, SEQ ID NO: 34, SEQ ID NO: 100, has a POLO box duplicated region, (PFAM profile accession # PF00659), identified with P_score 9.70E-35. The domain starts at amino acid 567 and ends at amino acid 637. The profile has a length of 77 amino acids. The regions of the profile that recognized the domain within the protein were from “profile start” residue number 1 to “profile end” residue number 77.

[0646] SCYL2, SEQ ID NO: 35, SEQ ID NO: 101, has a Protein kinase domain, (PFAM profile accession # PF00069), identified with P_score 8.00E-13. The domain starts at amino acid 32 and ends at amino acid 327. The profile has a length of 278 amino acids. The regions of the profile that recognized the domain within the protein were from “profile start” residue number 1 to “profile end” residue number 278.

[0647] SRPK2, SEQ ID NO: 36, SEQ ID NO: 102, has a Protein kinase domain, (PFAM profile accession # PF00069), identified with P_score 7.40E-42. The domain starts at amino acid 81 and ends at amino acid 0.686. The profile has a length of 278 amino acids. The regions of the profile that recognized the domain within the protein were from “profile start” residue number 1 to “profile end” residue number 278.

[0648] TLK1, SEQ ID NO: 37, SEQ ID NO: 103, has a Protein kinase domain, (PFAM profile accession # PF00069), identified with P_score 4.70E-71. The domain starts at amino acid 477 and ends at amino acid 755. The profile has a length of 278 amino acids. The regions of the profile that recognized the domain within the protein were from “profile start” residue number 1 to “profile end” residue number 278.

[0649] SGKO71, SEQ ID NO: 38, SEQ ID NO: 104, has a Protein kinase domain, (PFAM profile accession # PF00069), identified with P_score 7.60E-26. The domain starts at amino acid 28 and ends at amino acid 296. The profile has a length of 278 amino acids. The regions of the profile that recognized the domain within the protein were from “profile start” residue number 27 to “profile end” residue number 278.

[0650] SK516, SEQ ID NO: 39, SEQ ID NO: 105, has a Protein kinase domain, (PFAM profile accession # PF00069), identified with P_score 2.50E-44. The domain starts at amino acid 652 and ends at amino acid 915. The profile has a length of 278 amino acids. The regions of the profile that recognized the domain within the protein were from “profile start” residue number 1 to “profile end” residue number 278.

[0651] H85389, SEQ ID NO: 40, SEQ ID NO: 106, has a Protein kinase domain, (PFAM profile accession # PF00069), identified with P_score 3.90E-60. The domain starts at amino acid 69 and ends at amino acid 397. The profile has a length of 278 amino acids. The regions of the profile that recognized the domain within the protein were from “profile start” residue number 1 to “profile end” residue number 278.

[0652] Wee1b, SEQ ID NO: 41, SEQ ID NO: 107, has a Protein kinase domain, (PFAM profile accession # PF00069), identified with P_score 1.10E-49. The domain starts at amino acid 212 and ends at amino acid 486. The profile has a length of 278 amino acids. The regions of the profile that recognized the domain within the protein were from “profile start” residue number 1 to “profile end” residue number 272.

[0653] Wnk2, SEQ ID NO: 42, SEQ ID NO: 108, has a Protein kinase domain, (PFAM profile accession # PF00069), identified with P_score 6.60E-63. The domain starts at amino acid 181 and ends at amino acid 439. The profile has a length of 278 amino acids. The regions of the profile that recognized the domain within the protein were from “profile start” residue number 1 to “profile end” residue number 278.

[0654] MAP3K1, SEQ ID NO: 43, SEQ ID NO: 109, has a Protein kinase domain, (PFAM profile accession # PF00069), identified with P_score 1.00E-85. The domain starts at amino acid 1242 and ends at amino acid 1507. The profile has a length of 278 amino acids. The regions of the profile that recognized the domain within the protein were from “profile start” residue number 1 to “profile end” residue number 278.

[0655] MAP3K8, SEQ ID NO: 44, SEQ ID NO: 110, has a Protein kinase domain, (PFAM profile accession # PF00069), identified with P_score 2.10E-88. The domain starts at amino acid 468 and ends at amino acid 731. The profile has a length of 278 amino acids. The regions of the profile that recognized the domain within the protein were from “profile start” residue number 1 to “profile end” residue number 278.

[0656] Pak4 (Mus musculus), SEQ ID NO: 45 SEQ ID NO: 111, has a Protein kinase domain, (PFAM profile accession # PF00069), identified with P_score 5.00E-86. The domain starts at amino acid 323 and ends at amino acid 574. The profile has a length of 278 amino acids. The regions of the profile that recognized the domain within the protein were from “profile start” residue number 1 to “profile end” residue number 278.

[0657] Pak4, SEQ ID NO: 45 SEQ ID NO: 111, has a P21-Rho-binding domain, (PFAM profile accession # PF00786), identified with P_score 3.20E-12. The domain starts at amino acid 11 and ends at amino acid 69. The profile has a length of 64 amino acids. The regions of the profile that recognized the domain within the protein were from “profile start” residue number 1 to “profile end” residue number 64.

[0658] STLK6-rs, SEQ ID NO: 46 SEQ ID NO: 112, has a Protein kinase domain, (PFAM profile accession # PF00069), identified with P_score 2.60E-33. The domain starts at amino acid 58 and ends at amino acid 369. The profile has a length of 278 amino acids. The regions of the profile that recognized the domain within the protein were from “profile start” residue number 14 to “profile end” residue number 278.

[0659] MAP2K2, SEQ ID NO: 47 SEQ ID NO: 113, has a Protein kinase domain, (PFAM profile accession # PF00069), identified with P_score 3.20E-58. The domain starts at amino acid 72 and ends at amino acid 369. The profile has a length of 278 amino acids. The regions of the profile that recognized the domain within the protein were from “profile start” residue number 1 to “profile end” residue number 278.

[0660] CCK4, SEQ ID NO: 48 SEQ ID NO: 114, has a Protein kinase domain, (PFAM profile accession # PF00069), identified with P_score 6.70E-63. The domain starts at amino acid 796 and ends at amino acid 1061. The profile has a length of 278 amino acids. The regions of the profile that recognized the domain within the protein were from “profile start” residue number 1 to “profile end” residue number 272.

[0661] CCK4, SEQ ID NO: 48 SEQ ID NO: 114, has a Immunoglobulin domain, (PFAM profile accession # PF00047), identified with P_score 1.00E-61. The domain starts at amino acid 46 and ends at amino acid 103. The profile has a length of 45 amino acids. The regions of the profile that recognized the domain within the protein were from “profile start” residue number 1 to “profile end” residue number 45.

[0662] CCK4, SEQ ID NO: 48 SEQ ID NO: 114, has a Immunoglobulin domain, (PFAM profile accession # PF00047), identified with P_score 1.00E-61. The domain starts at amino acid 143 and ends at amino acid 202. The profile has a length of 45 amino acids. The regions of the profile that recognized the domain within the protein were from “profile start” residue number 1 to “profile end” residue number 45.

[0663] CCK4, SEQ ID NO: 48 SEQ ID NO: 114, has a Immunoglobulin domain, (PFAM profile accession # PF00047), identified with P-score 1.00E-61. The domain starts at amino acid 239 and ends at amino acid 303. The profile has a length of 45 amino acids. The regions of the profile that recognized the domain within the protein were from “profile start” residue number 1 to “profile end” residue number 45.

[0664] CCK4, SEQ ID NO: 48 SEQ ID NO: 114, has a Immunoglobulin domain, (PFAM profile accession # PF00047), identified with P_score 1.00E-61. The domain starts at amino acid 336 and ends at amino acid 393. The profile has a length of 45 amino acids. The regions of the profile that recognized the domain within the protein were from “profile start” residue number 1 to “profile end” residue number 45.

[0665] CCK4, SEQ ID NO: 48 SEQ ID NO: 114, has a Immunoglobulin domain, (PFAM profile accession # PF00047), identified with P score=1.00E-61. The domain starts at amino acid 426 and ends at amino acid 483. The profile has a length of 45 amino acids. The regions of the profile that recognized the domain within the protein were from “profile start” residue number 1 to “profile end” residue number 45.

[0666] CCK4, SEQ ID NO: 48 SEQ ID NO: 114, has a Immunoglobulin domain, (PFAM profile accession # PF00047), identified with P_score 1.00E-61. The domain starts at amino acid 517 and ends at amino acid 572. The profile has a length of 45 amino acids. The regions of the profile that recognized the domain within the protein were from “profile start” residue number 1 to “profile end” residue number 45.

[0667] CCK4, SEQ ID NO: 48 SEQ ID NO: 114, has a Immunoglobulin domain, (PFAM profile accession # PF00047), identified with P_score 1.00E-61. The domain starts at amino acid 606 and ends at amino acid 666. The profile has a length of 45 amino acids. The regions of the profile that recognized the domain within the protein were from “profile start” residue number 1 to “profile end” residue number 45.

[0668] LMR1, SEQ ID NO: 49 SEQ ID NO: 115, has a Protein kinase domain, (PFAM profile accession # PF00069), identified with P_score 1.10E-46. The domain starts at amino acid 125 and ends at amino acid 395. The profile has a length of 294 amino acids. The regions of the profile that recognized the domain within the protein were from “profile start” residue number 1 to “profile end” residue number 294.

[0669] RYK, SEQ ID NO: 50 SEQ ID NO: 116, has a Protein kinase domain, (PFAM profile accession # PF00069), identified with P_score 3.10E-8.1. The domain starts at amino acid 330 and ends at amino acid 596. The profile has a length of 278 amino acids. The regions of the profile that recognized the domain within the protein were from “profile start” residue number 1 to “profile end” residue number 276.

[0670] RYK, SEQ ID NO: 50 SEQ ID NO: 116, has a WIF domain, (PFAM profile accession # PF02019), identified with P_score 3.30E-91. The domain starts at amino acid 66 and ends at amino acid 194. The profile has a length of 132 amino acids. The regions of the profile that recognized the domain within the protein were from “profile start” residue number 1 to “profile end” residue number 132.

[0671] LRRK2, SEQ ID NO: 51 SEQ ID NO: 117, has a Protein kinase domain, (PFAM profile accession # PF00069), identified with P_score 1.00E-41. The domain starts at amino acid 1886 and ends at amino acid 2138. The profile has a length of 278 amino acids. The regions of the profile that recognized the domain within the protein were from “profile start” residue number 8 to “profile end” residue number 272.

[0672] LRRK2, SEQ ID NO: 51 SEQ ID NO: 117, has a Leucine Rich Repeat, (PFAM profile accession # PF00560), identified with P_score 2.10E-34. The domain starts at amino acid 983 and ends at amino acid 1004. The profile has a length of 23 amino acids. The regions of the profile that recognized the domain within the protein were from “profile start” residue number 1 to “profile end” residue number 23.

[0673] LRRK2, SEQ ID NO: 51 SEQ ID NO: 117, has a Leucine Rich Repeat, (PFAM profile accession # PF00560), identified with P_score 2.10E-34. The domain starts at amino acid 1012 and ends at amino acid 1035. The profile has a length of 23 amino acids. The regions of the profile that recognized the domain within the protein were from “profile start” residue number 1 to “profile end” residue number 23.

[0674] LRRK2, SEQ ID NO: 51 SEQ ID NO: 117, has a Leucine Rich Repeat, (PFAM profile accession # PF00560), identified with P_score 2.10E-34. The domain starts at amino acid 1036 and ends at amino acid 1058. The profile has a length of 23 amino acids. The regions of the profile that recognized the domain within the protein were from “profile start” residue number 1 to “profile end” residue number 23.

[0675] LRRK2, SEQ ID NO: 51 SEQ ID NO: 117, has a Leucine Rich Repeat, (PFAM profile accession # PF00560), identified with P_score 2.10E-34. The domain starts at amino acid 1084 and ends at amino acid 1103. The profile has a length of 23 amino acids. The regions of the profile that recognized the domain within the protein were from “profile start” residue number 1 to “profile end” residue number 23.

[0676] LRRK2, SEQ ID NO: 51 SEQ ID NO: 117, has a Leucine Rich Repeat, (PFAM profile accession # PF00560), identified with P_score 2.10E-34. The domain starts at amino acid 1108 and ends at amino acid 1129. The profile has a length of 23 amino acids. The regions of the profile that recognized the domain within the protein were from “profile start” residue number 1 to “profile end” residue number 23.

[0677] LRRK2, SEQ ID NO: 51 SEQ ID NO: 117, has a Leucine Rich Repeat, (PFAM profile accession # PF00560), identified with P_score 2.10E-34. The domain starts at amino acid 1130 and ends at amino acid 1153. The profile has a length of 23 amino acids. The regions of the profile that recognized the domain within the protein were from “profile start” residue number 1 to “profile end” residue number 23.

[0678] LRRK2, SEQ ID NO: 51 SEQ ID NO: 117, has a Leucine Rich Repeat, (PFAM profile accession # PF00560), identified with P_score 2.10E-34. The domain starts at amino acid 1174 and ends at amino acid 1196. The profile has a length of 23 amino acids. The regions of the profile that recognized the domain within the protein were from “profile start” residue number 1 to “profile end” residue number 23.

[0679] LRRK2, SEQ ID NO: 51 SEQ ID NO: 117, has a Leucine Rich Repeat, (PFAM profile accession # PF00560), identified with P_score 2.10E-34. The domain starts at amino acid 1197 and ends at amino acid 1218. The profile has a length of 23 amino acids. The regions of the profile that recognized the domain within the protein were from “profile start” residue number 1 to “profile end” residue number 23.

[0680] LRRK2, SEQ ID NO: 51 SEQ ID NO: 117, has a Leucine Rich Repeat, (PFAM profile accession # PF00560), identified with P_score 2.10E-34. The domain starts at amino acid 1221 and ends at amino acid 1244. The profile has a length of 23 amino acids. The regions of the profile that recognized the domain within the protein were from “profile start” residue number 1 to “profile end” residue number 23.

[0681] LRRK2, SEQ ID NO: 51 SEQ ID NO: 117, has a Leucine Rich Repeat, (PFAM profile accession # PF00560), identified with P score=2.10E-34. The domain starts at amino acid 1246 and ends at amino acid 1268. The profile has a length of 23 amino acids. The regions of the profile that recognized the domain within the protein were from “profile start” residue number 1 to “profile end” residue number 23.

[0682] LRRK2, SEQ ID NO: 51 SEQ ID NO: 117, has a Leucine Rich Repeat, (PFAM profile accession # PF00560), identified with P_score 2.10E-34. The domain starts at amino acid 1269 and ends at amino acid 1293. The profile has a length of 23 amino acids. The regions of the profile that recognized the domain within the protein were from “profile start” residue number 1 to “profile end” residue number 23.

[0683] pMLK4, SEQ ID NO: 52 SEQ ID NO: 118, has a Protein kinase domain, (PFAM profile accession # PF00069), identified with P_score 1.70E-87. The domain starts at amino acid 124 and ends at amino acid 398. The profile has a length of 294 amino acids. The regions of the profile that recognized the domain within the protein were from “profile start” residue number 1 to “profile end” residue number 292.

[0684] pMLK4, SEQ ID NO: 52 SEQ ID NO: 118, has a SH3 domain, (PFAM profile accession # PF00018), identified with P_score 2.00E-14. The domain starts at amino acid 45 and ends at amino acid 100. The profile has a length of 58 amino acids. The regions of the profile that recognized the domain within the protein were from “profile start” residue number 5 to “profile end” residue number 58.

[0685] KSR, SEQ ID NO: 53 SEQ ID NO: 119, has a Protein kinase domain, (PFAM profile accession # PF00069), identified with P_score 1.40E-31. The domain starts at amino acid 591 and ends at amino acid 731. The profile has a length of 294 amino acids. The regions of the profile that recognized the domain within the protein were from “profile start” residue number 1 to “profile end” residue number 147.

[0686] KSR, SEQ ID NO: 53 SEQ ID NO: 119, has a Protein kinase domain, (PFAM profile accession # PF00069), identified with P_score 1.40E-31. The domain starts at amino acid 753 and ends at amino acid 792. The profile has a length of 294 amino acids. The regions of the profile that recognized the domain within the protein were from “profile start” residue number 163 to “profile end” residue number 195.

[0687] KSR, SEQ ID NO: 53 SEQ ID NO: 119, has a Phorbol esters/diacylglycerol binding domain (C1 domain), (PFAM profile accession # PF00130), identified with P_score 0.008623. The domain starts at amino acid 348 and ends at amino acid 391. The profile has a length of 51 amino acids. The regions of the profile that recognized the domain within the protein were from “profile start” residue number 1 to “profile end” residue number 51.

[0688] KSR, SEQ ID NO: 53 SEQ ID NO: 119, has a MYND finger, (PFAM profile accession # PF01753), identified with P_score 1.311685. The domain starts at amino acid 360 and ends at amino acid 377. The profile has a length of 43 amino acids. The regions of the profile that recognized the domain within the protein were from “profile start” residue number 1 to “profile end” residue number 21.

[0689] KSR2, SEQ ID NO: 54 SEQ ID NO: 120, has a Protein kinase domain, (PFAM profile accession # PF00069), identified with P_score 6.90E-40. The domain starts at amino acid 698 and ends at amino acid 957. The profile has a length of 294 amino acids. The regions of the profile that recognized the domain within the protein were from “profile start” residue number 1 to “profile end” residue number 289.

[0690] KSR2, SEQ ID NO: 54 SEQ ID NO: 120, has a Phorbol esters/diacylglycerol binding domain (C1 domain), (PFAM profile accession # PF00130), identified with P_score 0.000127. The domain starts at amino acid 445 and ends at amino acid 488. The profile has a length of 51 amino acids. The regions of the profile that recognized the domain within the protein were from “profile start” residue number 1 to “profile end” residue number 51.

[0691] KIAA1646, SEQ ID NO: 55 SEQ ID NO: 121, has a Diacylglycerol kinase catalytic domain, (PFAM profile accession # PF00781), identified with P_score 2.50E-09. The domain starts at amino acid 132 and ends at amino acid 278. The profile has a length of 159 amino acids. The regions of the profile that recognized the domain within the protein were from “profile start” residue number 1 to “profile end” residue number 159.

[0692] DGK-beta, SEQ ID NO: 56 SEQ ID NO: 122, has a Diacylglycerol kinase accessory domain, (PFAM profile accession # PF00609), identified with P_score 3.30E-129. The domain starts at amino acid 582 and ends at amino acid 762. The profile has a length of 190 amino acids. The regions of the profile that recognized the domain within the protein were from “profile start” residue number 1 to “profile end” residue number 190.

[0693] DGK-beta, SEQ ID NO: 56 SEQ ID NO: 122, has a Diacylglycerol kinase catalytic domain, (PFAM profile accession # PF00781), identified with P_score 1.20E-71. The domain starts at amino acid 438 and ends at amino acid 562. The profile has a length of 159 amino acids. The regions of the profile that recognized the domain within the protein were from “profile start” residue number 1 to “profile end” residue number 159.

[0694] DGK-beta, SEQ ID NO: 56 SEQ ID NO: 122, has a Phorbol esters/diacylglycerol binding domain (C1 domain), (PFAM profile accession # PF00130), identified with P_score 5.00E-28. The domain starts at amino acid 245 and ends at amino acid 294. The profile has a length of 51 amino acids. The regions of the profile that recognized the domain within the protein were from “profile start” residue number 1 to “profile end” residue number 51.

[0695] DGK-beta, SEQ ID NO: 56 SEQ ID NO: 122, has a Phorbol esters/diacylglycerol binding domain (C1 domain), (PFAM profile accession # PF00130), identified with P_score 5.00E-28. The domain starts at amino acid 310 and ends at amino acid 358. The profile has a length of 51 amino acids. The regions of the profile that recognized the domain within the protein were from “profile start” residue number 1 to “profile end” residue number 51.

[0696] DGK-beta, SEQ ID NO: 56 SEQ ID NO: 122, has a EF hand, (PFAM profile accession # PF00036), identified with P_score 4.10E-17. The domain starts at amino acid 153 and ends at amino acid 181. The profile has a length of 29 amino acids. The regions of the profile that recognized the domain within the protein were from “profile start” residue number 1 to “profile end” residue number 29.

[0697] DGK-beta, SEQ ID NO: 56 SEQ ID NO: 122, has a EF hand, (PFAM profile accession # PF00036), identified with P_score 4.10E-17. The domain starts at amino acid 198 and ends at amino acid 226. The profile has a length of 29 amino acids. The regions of the profile that recognized the domain within the protein were from “profile start” residue number 1 to “profile end” residue number 29.

[0698] IP6K1, SEQ ID NO: 57 SEQ ID NO: 123, did not have a recognizable protein domain.

[0699] YAB1, SEQ ID NO: 58 SEQ ID NO: 124, has a ABC1 family, (PFAM profile accession # PF03109), identified with P_score 1.20E-42. The domain starts at amino acid 318 and ends at amino acid 434. The profile has a length of 124 amino acids. The regions of the profile that recognized the domain within the protein were from “profile start” residue number 1 to “profile end” residue number 124.

[0700] BRD2, SEQ ID NO: 62 SEQ ID NO: 128, has a Bromodomain, (PFAM profile accession # PF00439), identified with P_score 4.90E-91. The domain starts at amino acid 79 and ends at amino acid 168. The profile has a length of 92 amino acids. The regions of the profile that recognized the domain within the protein were from “profile start” residue number 1 to “profile end” residue number 92.

[0701] BRD2, SEQ ID NO: 62 SEQ ID NO: 128, has a Bromodomain, (PFAM profile accession # PF00439), identified with P_score 4.90E-91. The domain starts at amino acid 352 and ends at amino acid 441. The profile has a length of 92 amino acids. The regions of the profile that recognized the domain within the protein were from “profile start” residue number 1 to “profile end” residue number 92.

[0702] BRD3, SEQ ID NO: 63, SEQ ID NO: 129, has a Bromodomain, (PFAM profile accession # PF00439), identified with P_score 6.50E-87. The domain starts at amino acid 39 and ends at amino acid 128. The profile has a length of 92 amino acids. The regions of the profile that recognized the domain within the protein were from “profile start” residue number 1 to “profile end” residue number 92.

[0703] BRD3, SEQ ID NO: 63, SEQ ID NO: 129, has a Bromodomain, (PFAM profile accession # PF00439), identified with P_score 6.50E-87. The domain starts at amino acid 315 and ends at amino acid 403. The profile has a length of 92 amino acids. The regions of the profile that recognized the domain within the protein were from “profile start” residue number 1 to “profile end” residue number 92.

[0704] BRD4, SEQ ID NO: 64, SEQ ID NO: 130, has a Bromodomain, (PFAM profile accession # PF00439), identified with P_score 1.80E-90. The domain starts at amino acid 63 and ends at amino acid 152. The profile has a length of 92 amino acids. The regions of the profile that recognized the domain within the protein were from “profile start” residue number 1 to “profile end” residue number 92.

[0705] BRD4, SEQ ID NO: 64, SEQ ID NO: 130, has a Bromodomain, (PFAM profile accession # PF00439), identified with P_score 1.80E-90. The domain starts at amino acid 356 and ends at amino acid 445. The profile has a length of 92 amino acids. The regions of the profile that recognized the domain within the protein were from “profile start” residue number 1 to “profile end” residue number 92.

[0706] BRDT, SEQ ID NO: 65, SEQ ID NO: 131, has a Bromodomain, (PFAM profile accession # PF00439), identified with P_score 7.50E-86. The domain starts at amino acid 32 and ends at amino acid 121. The profile has a length of 92 amino acids. The regions of the profile that recognized the domain within the protein were from “profile start” residue number 1 to “profile end” residue number 92.

[0707] BRDT, SEQ ID NO: 65, SEQ ID NO: 131, has a Bromodomain, (PFAM profile accession # PF00439), identified with P_score 7.50E-86. The domain starts at amino acid 275 and ends at amino acid 364. The profile has a length of 92 amino acids. The regions of the profile that recognized the domain within the protein were from “profile start” residue number 1 to “profile end” residue number 92.

[0708] ZC1, SEQ ID NO: 66, SEQ ID NO: 132 has a Protein kinase domain, (PFAM profile accession # PF00069), identified with P_score 1.4E-91. The domain starts at amino acid 25 and ends at amino acid 289. The profile has a length of 278 amino acids. The regions of the profile that recognized the domain within the protein were from “profile start” residue number 1 to “profile end” residue-number 278.

[0709] ZC1, SEQ ID NO: 66, SEQ ID NO: 132 also has a CNH domain, (PFAM profile accession # PF00780), identified with P_score 9.2E-131. The domain starts at amino acid 1066 and ends at amino acid 1372. The profile has a length of 378 amino acids. The regions of the profile that recognized the domain within the protein were from “profile start” residue number 1 to “profile end” residue number 378.

IV. Biological Significance, Applications, and Clinical Relevance

[0710] For each protein kinase in this application, we provide a classification of the protein class and family to which it belongs, a summary of non-catalytic protein motifs, and a chromosomal location. This information can be used to suggest potential function, regulation or therapeutic utility for each of the proteins. Amplification of chromosomal region can be associated with various cancers. For amplicons discussed in this application, the source of information was Knuutila, et al (Knuutila S, Björkqvist A-M, Autio K, Tarkkanen M, Wolf M, Monni O, Szymanska J, Larramendy M L, Tapper J, Pere H. E1-Rifai W, Hemmer S, Wasenius V-M, Vidgren V & Zhu Y: DNA copy number amplifications in human neoplasms. Review of comparative genomic hybridization studies. Am J Pathol 152: 1107-1123, 1998. http://www.helsinki.fi/lgl_www/CMG.html).

[0711] The kinase classification and protein domains often reflect pathways, cellular roles, or mechanisms of up- or down-stream regulation. Also disease-relevant genes often occur in families of related genes. For example if one member of a-kinase family functions as an oncogene, a tumor suppressor, or has been found to be disrupted in an immune, neurologic, cardiovascular, or metabolic disorder, frequently other family members may play a related role.

I. Biological and Potential Clinical Implications of the Novel Protein Kinases

AGC Group

[0712] CRIK, SEQ ID NO: 1, SEQ ID NO: 67, DMPK2, SEQ ID NO: 2, SEQ ID NO: 68, MAST3, SEQ ID NO: 3, SEQ ID NO: 69, MAST205, SEQ ID NO: 4, SEQ ID NO: 70, MASTL, SEQ ID NO: 5, SEQ ID NO: 71, PKC_eta, SEQ ID NO: 6, SEQ ID NO: 72, H19102, SEQ ID NO: 7, SEQ ID NO: 73, MSK1, SEQ ID NO: 8, SEQ ID NO: 74, YANK3, SEQ ID NO: 9, SEQ ID NO: 75 are members of the AGC group of protein kinases. The AGC group of protein kinases includes as its major prototypes protein kinase C (PKC), cAMP-dependent protein kinases (PKA), the G protein-coupled receptor kinases [(ARK and rhodopsin kinase (GRK1)] as well as p70S6K and AKT.

[0713] The human CRIK protein and nucleic acid are described in this patent. By PCR of a mouse primary keratinocyte cDNA library, Di Cunto et al. (1998) identified murine CRIK (citron Rho-interacting kinase), belonging to the myotonic dystrophy kinase (see 605377) family. Murine CRIK can be expressed as at least 2 isoforms, one of which encompasses the previously reported form of citron in almost its entirety. The long form of murine CRIK is a 240-kD protein in which the kinase domain is followed by the sequence of citron. The short murine form, CRIK-SK (short kinase), is an approximately 54-kD protein that consists mostly of the kinase domain. CRIK and CRIK-SK proteins are capable of phosphorylating exogenous substrates as well as of autophosphorylation, when tested by in vitro kinase assays after expression into COS-7 cells. Murine CRIK kinase activity is increased several-fold by coexpression of constitutively active Rho, while active Rac has more limited effects. Kinase activity of the endogenous CRIK is indicated by in vitro kinase assays after immunoprecipitation with antibodies recognizing the citron moiety of the protein. When expressed in keratinocytes, full-length CRIK, but not CRIK-SK, localizes into corpuscular cytoplasmic structures and elicits recruitment of actin into these structures. The CRIK protein contains a kinase domain, a coiled-coil domain, a leucine-rich domain, a Rho-Rac binding domain, a zinc finger region, a pleckstrin homology domain, and a putative SH3-binding domain. Di Cunto, F.; Calautti, E.; Hsiao, J.; Ong, L.; Topley, G.; Turco, E.; Dotto, G. P.: Citron Rho-interacting kinase, a novel tissue-specific ser/thr kinase encompassing the Rho-Rac-binding protein citron. J. Biol. Chem. 273: 29706-29711, 1998.

[0714] The human DMPK2 protein and nucleic acid are described in this patent. The homolog DMPK1 is associated with myotonic dystrophy (DM), is a multisystem disorder and the most common form of muscular dystrophy in adults. One form of the disorder (Dystrophia Myotonica 1, DM1; 160900) is caused by an expanded CTG repeat in the 3-prime untranslated region of the dystrophia myotonica protein kinase gene (DMPK1; 605377) on 19q13. A CTG repeat in DMPK1 is transcribed and is located in the 3-prime untranslated region of an mRNA that is expressed in tissues affected by myotonic dystrophy. The polypeptide encoded by this mRNA is a member of the protein kinase family. Since the triplet repeat sequence is within a gene that has a sequence similar to protein kinases, Fu et al. (1992) suggested that the gene be referred to as myotonin-protein kinase. Jansen et al. (1992) demonstrated that the brain and heart transcripts of the DM-kinase gene are subject to alternative RNA splicing in both human and mouse. Given the homology between DMPK1 and DMPK2, DMPK2 may be involved in diseases similar to myotonic dystrophy. Fu, Y et al. Science 255: 1256-1258, 1992.

Jansen, G.; et al. Characterization of the myotonic dystrophy region predicts multiple protein isoform-encoding mRNAs. Nature Genet. 1: 261-266, 1992.

[0715] CRIK, SEQ ID NO: 1, SEQ ID NO: 67, and DMPK2, SEQ ID NO: 2, SEQ ID NO: 68 are a members of the DMPK family. These proteins, Dystrophia myotonica-protein kinases, may play a role in muscle contraction; trinucleotide repeat expansion mutations in the 3′ untranslated region of DMPK are associated with myotonic dystrophy. These genes may be involved in diseases of the muscle or nerves.

[0716] MAST3, SEQ ID NO: 3, SEQ ID NO: 69, MAST205, SEQ ID NO: 4, SEQ ID NO: 70, and MASTL, SEQ ID NO: 5, SEQ ID NO: 71, are a members of the MAST family. Mast protein kinases have strong similarity to microtubule associated testis specific serine/threonine protein kinase (mouse Mtssk), which may act in spermatid maturation and microtubule organization. These kinases may be involved in microtubule-associated disease processes, such as tumor cell invasion.

[0717] PKC_eta, SEQ ID NO: 6, SEQ ID NO: 72, is a member of the PKC family. Protein kinase C (PKC) is a family of enzymes that are physiologically activated by 1,2-diacylglycerol (DAG) and other lipids. To date, 11 different isozymes, alpha, betaI, betaII, gamma, delta, epsilon, nu, lambda(iota), mu, theta and zeta, have been identified. On the basis of their structure and activators, they can be divided into three groups, two of which are activated by DAG or its surrogate, phorbol 12-myristate 13-acetate (PMA). PKC isozymes are remarkably different in number and prevalence in different cell lines and tissues. When activated, the isozymes bind to membrane phospholipids or to receptors that are located in and anchor the enzymes in a subcellular compartment. Some PKCs may also be activated in their soluble form. These enzymes phosphorylate serine and threonine residues on protein substrates, perhaps the best known of which are the myristoylated, alanine-rich C kinase substrate and nuclear lamins A, B and C. The enzymes clearly play a role in signal transduction, and, because of the importance of PMA as a tumor promoter, they are thought to affect some aspect of cell cycling. (See “The sevenfold way of PKC regulation,” Liu W S, Heckman C A, Cell Signal, 1998 Sep. 10(8): 529-42).

[0718] H19102, SEQ ID NO: 7, SEQ ID NO: 73, MSK1, SEQ ID NO: 8, SEQ ID NO: 74, are members of the family of S6 kinases with a potential role in cancer, inflammation, as well as other disease conditions. Ribosomal protein S6 protein kinases play important pleotropic functions, among them is a key role in the regulation of mRNA translation during protein biosynthesis (Eur J Biochem 2000 November; 267(21): 6321-30, Exp Cell Res. 1999 Nov. 25; 253 (1): 100-9, Mol Cell Endocrinol 1999 May 25; 151(1-2): 65-77). The phosphorylation of the S6 ribosomal protein by p70S6 has also been implicated in the regulation of cell motility (Immunol Cell Biol 2000 August; 78(4): 447-51) and cell growth (Prog Nucleic Acid Res Mol Biol 2000; 65: 101-27), and hence, may be important in tumor metastasis, the immune response and tissue repair.

[0719] YANK3, SEQ ID NO: 9, SEQ ID NO: 75, is a member of the Protein Kinase superfamily. It is further classified into the AGC group, and the YANK family.

CAMK Group

[0720] MARK2, SEQ ID NO: 10, SEQ ID NO: 76, NuaK2, SEQ ID NO: 11, SEQ ID NO: 77, BRSK2, SEQ ID NO: 12, SEQ ID NO: 78, MARK4, SEQ ID NO: 13, SEQ ID NO: 79, DCAMKL2, SEQ ID NO: 14, SEQ ID NO: 80, PIM2, SEQ ID NO: 15, SEQ ID NO: 81, PIM3, SEQ ID NO: 16, SEQ ID NO: 82, and TSSK4, SEQ ID NO: 17, SEQ ID NO: 83, are classified into the CAMK group. The CAMK group of protein kinases includes as its major prototypes the calmodulin-dependent protein kinases, elongation factor-2 kinases, phosphorylase kinase and the Snfl and cAMP-dependent family of protein kinases.

CK1 Group

[0721] CKIL2, SEQ ID NO: 18, SEQ ID NO: 84, is a member of the Protein Kinase superfamily, the CK1 group, and the CKIL family. The casein kinase (CK) group of protein kinases includes as its major prototype casein kinaseI (CK1) and case in kinaseII (CKII). Both CK1 and CKII are ubiquitous, constitutively-active, second-messenger-independent kinases These highly conserved enzymes exist in multiple isoforms. CK1 functions in vesicular trafficking, DNA repair, cell cycle progression and cytokinesis (Cell Signal 1998 November; 10(10): 699-711). CKII functions in cell cycle progression in non-neural cells. CKII has also been implicated in multiple signaling pathways in normal and disease states of the mammalian nervous systems (Prog Neurobiol 2000 February; 60(3): 211-46).

Other Group

[0722] CKIIa-rs, SEQ ID NO: 22, SEQ ID NO: 88, is a member of the Protein Kinase superfamily, the Other group, and the CKII family.

CMGC Group

[0723] PCTAIRE3, SEQ ID NO: 19, SEQ ID NO: 85 and PFTAIRE2, SEQ ID NO: 20, SEQ ID NO: 86 belong in the CMGC group, and the CDK family. The CMGC group of protein kinases includes as its major prototypes the cyclin-dependent protein kinases as well as the MAPK kinases family member. The CDK family to which these kinases belong regulates the cell cycle, as well as transcription and other basic cellular processes.

[0724] ERK7, SEQ ID NO: 21, SEQ ID NO: 87, is a member of the Protein Kinase superfamily. It is further classified into the CMGC group, and the MAPK family. Member of the MAP kinase family of proteins, which are involved in signal transduction; may interact with MEK family of kinases.

[0725] DYRK4, SEQ ID NO: 23, SEQ ID NO: 89, is a member of the Protein Kinase superfamily. It is further classified into the Other group, and the DYRK family.

[0726] HIPK1, SEQ ID NO: 24, SEQ ID NO: 90, is a member of the Protein Kinase superfamily. It is further classified into the Other group, and the DYRK family.

[0727] HIPK4, SEQ ID NO: 25, SEQ ID NO: 91, is a member of the Protein Kinase superfamily. It is further classified into the Other group, and the DYRK family.

[0728] SRPK2, SEQ ID NO: 36, SEQ ID NO: 102, is a member of the Protein Kinase superfamily. It is further classified into the GMGC group, and the SRPK family. Its role is in mRNA splicing.

Other Family

[0729] BIKE, SEQ ID NO: 26, SEQ ID NO: 92, is a member of the Protein Kinase superfamily. It is further classified into the Other group, and the NAK family. Bike (BMP-2-Inducible Kinase) kinase activity impairs osteoblast differentiation in vitro Kearns A E, et al., J Biol Chem 2001 Nov. 9; 276(45): 42213-8. Since differentiation of osteoblasts is an important step in the progression of bone diseases such as osteoporosis and cancer associated bone degradation, inhibition of Bike may be an excellent means of treating these diseases, as well as others associated with aberrant bone biology.

NEK Family

[0730] NEK10, SEQ ID NO: 27, SEQ ID NO: 93, NEK5, SEQ ID NO: 28, SEQ ID NO: 94, NEK1, SEQ ID NO: 29, SEQ ID NO: 95, NEK3, SEQ ID NO: 30, SEQ ID NO: 96, are members of the Protein Kinase superfamily, the Other group, and the NEK family. The prototype for this family, NIMA (never in mitosis, gene A), was originally identified in Aspergillus nidulans as a serine/threonine kinase critical for cell cycle progression. NIMA is specifically required to initiate the cytological aspects of mitosis. Temperature-sensitive mutants of NIMA or overexpression of dominant negative forms of NIMA cause cells to arrest in G2 with uncondensed DNA and interphase microtubules (Osmani, (1991) Cell 67, 283-291). In addition, overexpression of NIMA in fungus as well as in mammalian cells results in the early onset of mitotic events, including chromatin condensation and depolymerization of microtubules (Lu, K. P., and Hunter, T. (1995) Prog. Cell Cycle Res. 1, 187-205). The ability of NIMA to functionally regulate mitosis in higher organisms has suggested the existence of a conserved NIMA-like pathway in eukaryotes. However, only in the filamentous ascomycete, Neurospora crassa, and the fission yeast Schizosaccharomyces pombe have functional homologs been identified. Several mammalian Neks have been identified. These typically contain 40-50% sequence identity, which is confined to the catalytic domain. Positional cloning studies revealed Nek1 as the gene that is altered in polycystic kidney disease, although its precise function remains unknown (Upadhya, P., (2000) Proc. Natl. Acad. Sci. U.S.A. 97, 217-221). Nek2 represents the best characterized mammalian Nek. Nek2 displays cell-cycle dependent expression similar to NIMA, both being most abundant at the onset of mitosis (Pry, A. M., (1995) J. Biol. Chem. 270, 12899-12905). Endogenous Nek2 associates with centrosomes, and overexpression of active Nek2 in cells causes a pronounced splitting of centrosomes, required for G2/M transition. Nek2 phosphorylates a centrosomal coiled-coil protein, c-Nap 1, and also associates with protein phosphatase 1 (Helps, N. R., (2000) Biochem. J. 349, 509-518). These findings suggest that Nek2 contributes to proper centrosomal function. Characterization of Nek9 has recently been published (Holland, P M et al., J. Biol. Chem., Vol. 277, Issue 18, 16229-16240, May 3, 2002). The novel NEK genes described in this application may play roles in cell-cycle regulation, protein synthesis, changes in cell morphology and regulation of protein sorting.

[0731] These genes are classified within the NKF1 family: SGK069, SEQ ID NO: 31, SEQ ID NO: 97, and SGK110, SEQ ID NO: 32, SEQ ID NO: 98, are members of the Protein Kinase superfamily, classified into the Other group, and the NKF1 family.

[0732] NRBP2, SEQ ID NO: 33, SEQ ID NO: 99, is a member of the Protein Kinase superfamily. It is further classified into the Other group, and the NRBP family. This family is related to the WNK family of kinases, and like the WNK family, may be involved in hypertension.

[0733] CNK, SEQ ID NO: 34, SEQ ID NO: 100, is a member of the Protein Kinase superfamily. It is further classified into the Other group, and the PLK family. CNK seems to be required in a step between RAS and RAF or in parallel to RAF, and its function is required for normal cell proliferation and differentiation (PNAS, Therrien, M., et al, Vol. 96, Issue 23, 13259-13263, Nov. 9, 1999). Its role in Ras signalling may implicate it in aberrant signaling associated with cancer, inflammation or CNS disorders.

[0734] SCYL2, SEQ ID NO: 35, SEQ ID NO: 101, is a member of the Protein Kinase superfamily. It is further classified into the Other group, and the SCY1 family.

[0735] TLK1, SEQ ID NO: 37, SEQ ID NO: 103, is a member of the Protein Kinase superfamily. It is further classified into the Other group, and the TLK family.

[0736] SGK071, SEQ ID NO: 38, SEQ ID NO: 104, is a member of the Protein Kinase superfamily. It is further classified into the Other group, and the Unique family.

[0737] SK516, SEQ ID NO: 39, SEQ ID NO: 105, is a member of the Protein Kinase superfamily. It is further classified into the Other group, and the Unique family.

[0738] H85389, SEQ ID NO: 40, SEQ ID NO: 106, is a member of the Protein Kinase superfamily. It is further classified into the Other group, and the ULK family. It is related to hedgehog signaling.

[0739] Wee1b, SEQ ID NO: 41, SEQ ID NO: 107, is a member of the Protein Kinase superfamily. It is further classified into the Other group, and the WEE family.

[0740] Wnk2, SEQ ID NO: 42, SEQ ID NO: 108, is a member of the Protein Kinase superfamily. It is further classified into the Other group, and the Wnk family. Wnk2 belongs to the same family as Wnk1 and Wnk4, which have been shown to be involved in human hypertension (Wilson F H, et al. Science, 2001 Aug. 10; 293(5532): 1030). Wnk1 and Wnk4 cause pseudohypoaldosteronism type II, a Mendelian trait featuring hypertension, increased renal salt reabsorption, and impaired K+ and H+ excretion. Disease-causing mutations in WNK1 are large intronic deletions that increase WNK1 expression. The mutations in WNK4 are missense, which cluster in a short, highly conserved segment of the encoded protein. Both proteins localize to the distal nephron, a kidney segment involved in salt, K+, and pH homeostasis. WNK1 is cytoplasmic, whereas WNK4 localizes to tight junctions. The WNK kinases and their associated signaling pathway(s) may offer new targets for the development of antihypertensive drugs. Based on its similarity to Wnk1 and Wnk4, Wnk2 may play a role in human hypertension.

STE Group

[0741] The STE group of protein kinases represent key regulators of multiple signal transduction pathways important in cell proliferation, survival, differentiation and response to cellular stress. The STE group of protein kinases includes as its major prototypes the NEK kinases as well as the STE11 and STE20 family of sterile protein kinases. MAP3K8, SEQ ID NO: 44, SEQ ID NO: 110, is a member of the STE11 family; Pak5_m, SEQ ID NO: 45 SEQ ID NO: 111, is a member of the STE20 family; STLK6-rs, SEQ ID NO: 46 SEQ ID NO: 112, is a member of the STE20 family; MAP2K2, SEQ ID NO: 47 SEQ ID NO: 113, is a member of the STE7 family. Based on the similarity to STE family members, these novel kinases may participate in cell cycle regulation.

Tyrosine Kinase Group

[0742] The tyrosine kinase group encompass both cytoplasmic (e.g. src) as well as transmembrane receptor tyrosine kinases (e.g. EGF receptor). These kinases play a pivotal role in the signal transduction processes that mediate cell proliferation, differentiation and apoptosis. Three genes are classified as tyrosine kinases: CCK4, SEQ ID NO: 48 SEQ ID NO: 114, is classified into the TK group, and the CCK4 family; LMR1, SEQ ID NO: 49 SEQ ID NO: 115, classified into the TK group, and the Lmr family; and RYK, SEQ ID NO: 50 SEQ ID NO: 116, is classified into the TK group, and the Ryk family.

Tyrosine Kinase-Like (TKL) Group

[0743] The TKL family represents protein kinases that are more closely related to tyrosine kinases than to serine-threonine kinases. The TKL family consists of the IRAK, LISK, LRRK, MLK, RAF/KSR and STKR sub-families (Manning, G, et al, The Human Kinome, submitted to Science, June 2002; see also www.kinase.com for kinase classification). LRRK2, SEQ ID NO: 51 SEQ ID NO: 117, is classified into the TKL group, and the LRRK family; MLK4, SEQ ID NO: 52 SEQ ID NO: 118, is classified into the TKL group, and the MLK family; KSR, SEQ ID NO: 53 SEQ. ID NO: 119, is classified into the TKL group, and the RAF family; KSR2, SEQ ID NO: 54 SEQ ID NO: 120, is classified into the TKL group, and the RAF family.

Lipid Kinase Superfamily

[0744] KIAA1646, SEQ ID NO: 55 SEQ ID NO: 121, and DGK-beta, SEQ ID NO: 56 SEQ ID NO: 122, are members of the Lipid Kinase superfamily and the DAG/DGK family. Diacylglycerol kinases (DGKs) phosphorylate the second-messenger diacylglycerol (DAG) to phosphatidic acid (PA). The family of DGKs is well conserved among most species. Nine mammalian isotypes have been identified, and are classified into five subgroups based on their primary structure. DGKs contain a conserved catalytic domain and an array of other conserved motifs that are likely to play a role in lipid-protein and protein-protein interactions in various signalling pathways dependent on DAG and/or PA production. DGK is therefore believed to be activated at the (plasma) membrane where DAG is generated. Some isotypes are found associated with and/or regulated by small GTPases of the Rho family. Others are (also) found in the nucleus, in association with other regulatory enzymes of the phosphoinositide cycle, and have an effect on cell cycle progression. Most DGK isotypes show high expression in the brain, often in distinct brain regions, suggesting that each individual isotype has a unique function. (see “Properties and functions of diacylglycerol kinases,” van Blitterswijk W J; Cell Signal 2000 October; 12(9-10): 595-605).

[0745] IP6K1, SEQ ID NO: 57 SEQ ID NO: 123, is a member of the Lipid Kinase superfamily. It is further classified into the Inositol kinase group, and the IP6K family (J. Biol. Chem., Vol. 276, Issue 44, 40998-41004, Nov. 2, 2001). Signaling through the inositol phosphate pathway involves a series of kinases and phosphatases that phosphorylate and dephosphorylate the large number of soluble inositol polyphosphates known to exist in eukaryotic cells (Shears, S. B. (1991). Pharmacol. Ther. 49, 79-104). A branch point in this pathway occurs with the production of inositol 1,3,4-trisphosphate (Ins(1,3,4)P3)1, resulting from the hydrolysis of inositol 1,3,4,5-tetrakisphosphate (Ins(1,3,4,5)P4) by one of the numerous inositol polyphosphate 5-phosphatase isozymes. Ins(1,3,4)P3 can be dephosphorylated by specific phosphatases, resulting ultimately in the generation of myo-inositol, or it can be phosphorylated further, resulting in the formation of higher phosphorylated forms of inositol. Inositol 1,3,4-trisphosphate 5/6-kinase (5/6-kinase) phosphorylates Ins(1,3,4)P3 to form both inositol 1,3,4,6-tetrakisphosphate (Ins(1,3,4,6)P4) and Ins(1,3,4,5)P4. Ins(1,3,4,6)P4 is the first intermediate in the pathway leading to the formation of the higher phosphorylated inositols including other inositol tetrakisphosphate isomers, inositol 1,3,4,5,6-pentakisphosphate (InsP5), inositol hexakisphosphate (InsP6), and the pyrophosphate forms of inositol (Safrany, S. T., et al. (1999) Biol. Chem. 380, 945-951). IP6K1, SEQ ID NO: 57 SEQ ID NO: 123 may play a role in signalling pathways mediated by phosphoinositol molecules, such as cancer, inflammation and CNS diseases.

Atypical Group

ABC1 family

[0746] YAB1, SEQ ID NO: 58 SEQ ID NO: 124, AF052122, SEQ ID NO: 59 SEQ ID NO: 125, and AAF23326, SEQ ID NO: 60 SEQ ID NO: 126 are members of the ABC1 family. ABC1 is an anciently-conserved family of atypical kinases. The family has four members in human, five in Drosophila, and three each in C. elegans and S. cerevisiae. There is weak sequence and structural similarity between ABC1 family members and eukaryotic protein kinases (see Novel Families of Putative Protein Kinases in Bacteria and Archaea: Evolution of the Eukaryotic Protein Kinase Superfamily, C J Leonared, et al., Genome Research, 8: 1038-1047, 1998). Some family members are localized to the nucleus or the mitochondrion, and may function as novel chaperonins and in energy metabolism. Human family members may serve as targets for disrupting metabolism of cancer cells, for conditions where folding and turnover of proteins is misregulated, or where disruption of protein folding or turnover may have a therapeutic effect, as has been seen recently with the use of proteasome inhibitors to treat a range of cancers.

Rio Family

[0747] SGK493, SEQ ID NO: 61 SEQ ID NO: 127, is a member of the atypical PK superfamily, and the RIO1 family. Rio is an anciently-conserved family of atypical kinases. Three Rio genes are present in the human genome, with distinct orthologs in fly and worm, and homologs in fingi, archeal bacteria and plants. Rio kinases have weak protein and structural similarity to eukaryotic protein kinases, and biochemical kinase activity has recently been shown for the Rio1 family member in S. cerevisiae (Angermayr et al., (2002) Molecular Microbiology 44(2): 309-24). Rio1 is required for proper cell cycle and cell division, and for mRNA processing. Both family members in yeast (Rio1 and Rio2) are essential genes null mutants are lethal. Emericella nidulans sudD is another member of the family and is also involved in cell cycle and chromosome segregation. These conserved functions indicate that human members of this family may play critical roles in cell cycle and constitute tractable targets for cancer therapies.

BRD Family

[0748] BRD2, SEQ ID NO: 62 SEQ ID NO: 128, BRD3, SEQ ID NO: 63, SEQ ID NO: 129, BRD4, SEQ ID NO: 64, SEQ ID NO: 130, and BRDT, SEQ ID NO: 65, SEQ ID NO: 131, are members of the atypical protein kinase superfamily, belonging to the BRD sub-family This family consists of 4 human members, with a single ortholog in Drosophila and in C. elegans. This phylogenetic footprint indicates that the family plays an essential role in metazoan animals, and has been expanded to serve more specialized or expanded functions in humans. All family members contain two bromodomains, thought to be involved in chromosome biology, and an additional conserved region which bears weak sequence and structural similarity to the eukaryotic protein kinase domain. The Drosophila ortholog, fsh is involved in homeotic gene function and chromosomal imprinting. One of the human family members, BRD2/RING3 has been shown to have protein kinase activity. (Denis G V, et al., RING3 kinase transactivates promoters of cell cycle regulatory genes through E2F.Cell Growth Differ. 2000 August; 11(8): 417-24). BRD2 expression is elevated in certain human leukemias, is localized to the nucleus and is required for induction of expression of a number of cell cycle genes. This data, and the bromodomains found in other family members indicate that all family members may be involved in control of cell cycle, chromosome function and oncogenic transformation.

### Example 3

### Isolation of cDNAs Encoding Mammalian Protein Kinases

[0749] Materials and Methods

[0750] Identification of Novel Clones

[0751] Total RNAs are isolated using the Guanidine Salts/Phenol extraction protocol of Chomczynski and Sacchi (P. Chomczynski and N. Sacchi, Anal. Biochem. 162, 156 (1987)) from primary human tumors, normal and tumor cell lines, normal human tissues, and sorted human hematopoietic cells. These RNAs are used to generate single-stranded cDNA using the Superscript Preamplification System (GIBCO BRL, Gaithersburg, Md.; Gerard, G F et al. (1989), FOCUS 11, 66) under conditions recommended by the manufacturer. A typical reaction uses 10 μg total RNA with 1.5 μg oligo(dT)₁₂₋₁₈ in a reaction volume of 60 μL. The product is treated with RNaseH and diluted to 100 μL with H₂O. For subsequent PCR amplification, 1-4 μL of this sscDNA is used in each reaction.

[0752] Degenerate oligonucleotides are synthesized on an Applied Biosystems 3948 DNA synthesizer using established phosphoramidite chemistry, precipitated with ethanol and used unpurified for PCR. These primers are derived from the sense and antisense strands of conserved motifs within the catalytic domain of several protein kinases. Degenerate nucleotide residue designations are: N=A, C, G, or T; R=A or G; Y=C or T; H=A, C or T not G; D=A, G or T not C; S=C or G; and W=A or T.

[0753] PCR reactions are performed using degenerate primers applied to multiple single-stranded cDNAs. The primers are added at a final concentration of 5 μM each to a mixture containing 10 mM Tris HCl, pH 8.3, 50 mM KCl, 1.5 mM MgCl₂, 200 μM each deoxynucleoside triphosphate, 0.001% gelatin, 1.5 U AmpliTaq DNA Polymerase (Perkin-Elmer/Cetus), and 1-4 μL cDNA. Following 3 min denaturation at 95° C., the cycling conditions are 94° C. for 30 s, 50° C. for 1 min, and 72° C. for 1 min 45 s for 35 cycles. PCR fragments migrating between 300-350 bp are isolated from 2% agarose gels using the GeneClean Kit (Bio101), and T-A cloned into the pCRII vector (Invitrogen Corp. U.S.A.) according to the manufacturer's protocol.

[0754] Colonies are selected for mini plasmid DNA-preparations using Qiagen columns and the plasmid DNA is sequenced using a cycle sequencing dye-terminator kit with AmpliTaq DNA Polymerase, FS (ABI, Foster City, Calif.). Sequencing reaction products are run on an ABI Prism 377 DNA Sequencer, and analyzed using the BLAST alignment algorithm (Altschul, S. F. et al., J. Mol. Biol. 215: 403-10).

[0755] Additional PCR strategies are employed to connect various PCR fragments or ESTs using exact or near exact oligonucleotide primers. PCR conditions are as described above except the annealing temperatures are calculated for each oligo pair using the formula: Tm=4(G+C)+2(A+T).

[0756] Isolation of cDNA Clones

[0757] Human cDNA libraries are probed with PCR or EST fragments corresponding to kinase-related genes. Probes are ³²P-labeled by random priming and used at 2×10⁶ cpm/mL following standard techniques for library screening. Pre-hybridization (3 h) and hybridization (overnight) are conducted at 42 oC in 5×SSC, 5× Denhart's solution, 2.5% dextran sulfate, 50 mM Na₂PO₄/NaBPO₄, pH 7.0, 50% formamide with 100 mg/mL denatured salmon sperm DNA. Stringent washes are performed at 65° C. in 0.1×SSC and 0.1% SDS. DNA sequencing was carried out on both strands using a cycle sequencing dye-terminator kit with AmpliTaq DNA Polymerase, FS (ABI, Foster City, Calif.). Sequencing reaction products are run on an ABI Prism 377 DNA Sequencer.

### Example 4

### Expression Analysis of Mammalian Protein Kinases

[0758] Materials and Methods

[0759] Northern Blot Analysis

[0760] Northern blots are prepared by running 10 μg total RNA isolated from 60 human tumor cell lines (such as HOP-92, EKVX, NCI-H23, NCI-H226, NCI-H322M, NCI-H460, NCI-H522, A549, HOP-62, OVCAR-3, OVCAR-4, OVCAR-5, OVCAR-8, IGROV1, SK-OV-3, SNB-19, SNB-75, U251, SF-268, SF-295, SF-539, CCRF-CEM, K-562, MOLT-4, HL-60, RPMI 8226, SR, DU-145, PC-3, HT-29, HCC-2998, HCT-116, SW620, Colo 205, HTC15, KM-12, UO-31, SN12C, A498, CaKi1, RXF-393, ACHN, 786-0, TK-10, LOX IMVI, Malme-3M, SK-MEL-2, SK-MEL-5, SK-MEL-28, UACC-62, UACC-257, M14, MCF-7, MCF-7/ADR RES, Hs578T, MDA-MB-231, MDA-MB-435, MDA-N, BT-549, T47D), from human adult tissues (such as thymus, lung, duodenum, colon, testis, brain, cerebellum, cortex, salivary gland, liver, pancreas, kidney, spleen, stomach, uterus, prostate, skeletal muscle, placenta, mammary gland, bladder, lymph node, adipose tissue), and 2 human fetal normal tissues (fetal liver, fetal brain), on a denaturing formaldehyde 1.2% agarose gel and transferring to nylon membranes.

[0761] Filters are hybridized with random primed [α³²P]dCTP-labeled probes synthesized from the inserts of several of the kinase genes. Hybridization is performed at 42° C. overnight in 6×SSC, 0.1% SDS, 1× Denhardt's solution, 100 μg/mL denatured herring sperm DNA with 1-2×10⁶ cpm/mL of ³²P-labeled DNA probes. The filters are washed in 0.1×SSC/0.1% SDS, 65° C., and exposed on a Molecular Dynamics phosphorimager.

[0762] Quantitative PCR Analysis

[0763] RNA is isolated from a variety of normal human tissues and cell lines. Single stranded cDNA is synthesized from 10 μg of each RNA as described above using the Superscript Preamplification System (GibcoBRL). These single strand templates are then used in a 25 cycle PCR reaction with primers specific to each clone. Reaction products are electrophoresed on 2% agarose gels, stained with ethidium bromide and photographed on a UV light box. The relative intensity of the STK-specific bands were estimated for each sample.

[0764] DNA Array Based Expression Analysis

[0765] Plasmid DNA array blots are prepared by loading 0.5 μg denatured plasmid for each kinase on a nylon membrane. The [γ³²P]dCTP labeled single stranded DNA probes are synthesized from the total RNA isolated from several human immune tissue sources or tumor cells (such as thymus, dendrocytes, mast cells, monocytes, B cells (primary, Jurkat, RPMI8226, SR), T cells (CD8/CD4⁺, TH1, TH2, CEM, MOLT4), K562 (megakaryocytes). Hybridization is performed at 42° C. for 16 hours in 6×SSC, 0.1% SDS, 1× Denhardt's solution, 100 μg/mL denatured herring sperm DNA with 10⁶ cpm/mL of [γ³²P]dCTP labeled single stranded probe. The filters are washed in 0.1×SSC/0.1% SDS, 65° C., and exposed for quantitative analysis on a Molecular Dynamics phosphorimager.

### Example 5

### Protein Kinase Gene Expression

[0766] Vector Construction

[0767] Materials and Methods

[0768] Expression Vector Construction

[0769] Expression constructs are generated for some of the human cDNAs including: a) full-length clones in a pcDNA expression vector; b) a GST-fusion construct containing the catalytic domain of the novel kinase fused to the C-terminal end of a GST expression cassette; and c) a full-length clone containing a Lys to Ala (K to A) mutation at the predicted ATP binding site within the kinase domain, inserted in the pcDNA vector.

[0770] The “K to A” mutants of the kinase might function as dominant negative constructs, and will be used to elucidate the function of these novel STKs.

### Example 6

### Generation of Specific Immunoreagents to Protein Kinases

[0771] Materials and Methods

[0772] Specific immunoreagents are raised in rabbits against KLH- or MAP-conjugated synthetic peptides corresponding to isolated kinase polypeptides. C-terminal peptides were conjugated to KLH with glutaraldehyde, leaving a free C-terminus. Internal peptides were MAP-conjugated with a blocked N-terminus. Additional immunoreagents can also be generated by immunizing rabbits with the bacterially expressed GST-fusion proteins containing the cytoplasmic domains of each novel PTK or STK.

[0773] The various immune sera are first tested for reactivity and selectivity to recombinant protein, prior to testing for endogenous sources.

[0774] Western Blots

[0775] Proteins in SDS PAGE are transferred to immobilon membrane. The washing buffer is PBST (standard phosphate-buffered saline pH 7.4+0.1% Triton X-100). Blocking and antibody incubation buffer is PBST+5% milk. Antibody dilutions varied from 1:1000 to 1:2000.

### Example 7

### Recombinant Expression and Biological Assays for Protein Kinases

[0776] Materials and Methods

[0777] Transient Expression of Kinases in Mammalian Cells

[0778] The pcDNA expression plasmids (10 μg DNA/100 mm plate) containing the kinase constructs are introduced into 293 cells with lipofectamine (Gibco BRL). After 72 hours, the cells are harvested in 0.5 mL solubilization buffer (20 mM HEPES, pH 7.35, 150 mM NaCl, 10% glycerol, 1% Triton X-100, 1.5 mM MgCl₂, 1 mM EGTA, 2 mM phenylmethylsulfonyl fluoride, 1 μg/mL aprotinin). Sample aliquots are resolved by SDS polyacrylamide gel electrophoresis (PAGE) on 6% acrylamide/0.5% bis-acrylamide gels and electrophoretically transferred to nitrocellulose. Non-specific binding is blocked by preincubating blots in Blotto (phosphate buffered saline containing 5% w/v non-fat dried milk and 0.2% v/v nonidet P-40 (Sigma)), and recombinant protein was detected using the various anti-peptide or anti-GST-fusion specific antisera.

[0779] In Vitro Kinase Assays

[0780] Three days after transfection with the kinase expression constructs, a 10 cm plate of 293 cells is washed with PBS and solubilized on ice with 2 mL PBSTDS containing phosphatase inhibitors (10 mM NaHPO₄, pH 7.25, 150 mM NaCl, 1% Triton X-100, 0.5% deoxycholate, 0.1% SDS, 0.2% sodium azide, 1 mM NaF, 1 mM EGTA, 4 mM sodium orthovanadate, 1% aprotinin, 5 μg/mL leupeptin). Cell debris was removed by centrifugation (12000×g, 15 min, 4° C.) and the lysate was precleared by two successive incubations with 50 μL of a 1:1 slurry of protein A sepharose for 1 hour each. One-half mL of the cleared supernatant was reacted with 10 μL of protein A purified kinase-specific antisera (generated from the GST fusion protein or antipeptide antisera) plus 50 μL of a 1:1 slurry of protein A-sepharose for 2 hr at 4° C. The beads were then washed 2 times in PBSTDS, and 2 times in HNTG (20 mM HEPES, pH 7.5/150 mM NaCl, 0.1% Triton X-100, 10% glycerol).

[0781] The immunopurified kinases on sepharose beads are resuspended in 20 μL HNTG plus 30 mM MgCl₂, 10 mM MnCl₂, and 20 μCi [a ³²P]ATP (3000 Ci/mmol). The kinase reactions are run for 30 min at room temperature, and stopped by addition of HNTG supplemented with 50 mM EDTA. The samples are washed 6 times in HNTG, boiled 5 min in SDS sample buffer and analyzed by 6% SDS-PAGE followed by autoradiography. Phosphoamino acid analysis is performed by standard 2D methods on ³²P-labeled bands excised from the SDS-PAGE gel.

[0782] Similar assays are performed on bacterially expressed GST-fusion constructs of the kinases.

### Example 8a

### Chromosomal Localization of Protein Kinases (Table 5)

[0783] Materials and Methods

[0784] Chromosomal location can identify candidate targets for a tumor amplicon or a tumor-suppressor locus. Summaries of prevalent tumor amplicons are available in the literature, and can identify tumor types to experimentally be confirmed to contain amplified copies of a kinase gene which localizes to an adjacent region. Several sources were used to find information about the chromosomal localization of each of the genes described in this patent. Materials and Methods

[0785] Several sources were used to find information about the chromosomal localization of each of the genes described in this patent. First, the Celera Browser was used to map the genes. A second source was through BLAT searching of the Human Genome using the University of California, Santa Cruz web tools (http://genome.ucsc.edu/). Alternatively, the accession number of a genomic contig (identified by BLAST against NRNA) was used to query the Entrez Genome Browser (http://www.ncbi.nlm.nih.gov/PMGifs/Genomes/MapViewerHelp.html), and the cytogenetic localization was read from the NCBI data. References for association of the mapped sites with chromosomal amplifications found in human cancer can be found in: Knuutila, et al., Am J Pathol, 1998, 152: 1107-1123. Information on mapped positions was also obtained by searching published literature (at NCBI, http://www.ncbi.nlm.nih.gov/entrez/guery.fcgi) for documented association of the mapped position with human disease.

[0786] 1. Results

[0787] The chromosomal regions for mapped genes are listed Table 5, and are discussed in the section Nucleic Acids above. The chromosomal positions were cross-checked with the Online Mendelian Inheritance in Man database (OMIM, http://www.ncbi.nlm.nih.gov/htbin-post/Omim), which tracks genetic information for many human diseases, including cancer. References for association of the mapped sites with chromosomal abnormalities found in human cancer can be found in: Knuutila, et al., Am J Pathol, 1998, 152: 1107-1123. A third source of information on mapped positions was searching published literature (at NCBI, http://www.ncbi.nlm.nih.gov/entrez/query.fcgi) for documented association of the mapped position with human disease.

[0788] Several sources were used to find information about the chromosomal localization of each of the genes described in this patent. First, cytogenetic map locations of these contigs were found in the title or text of their Genbank record, or by inspection through the NCBI human genome map viewer (http://www.ncbi.nlm.nih.gov/cgi-bin/Entrez/hum_srch?).

[0789] Alternatively, the accession number of a genomic contig (identified by BLAST against NRNA) was used to query the Entrez Genome Browser (http://www.ncbi.nlm.nih.gov/PMGifs/Genomes/MapViewerHelp.html), and the cytogenetic localization was read from the NCBI data. A thorough search of available literature for the cytogenetic region is also made using Medline (http://www.ncbi.nlm.nih.gov/PubMed/medline.html). References for association of the mapped sites with chromosomal amplifications found in human cancer can be found in: Knuutila, et al., Am J Pathol, 1998, 152: 1107-1123.

[0790] Alternatively, the accession number for the nucleic acid sequence is used to query the Unigene database. The site containing the Unigene search engine is: http://www.ncbi.nlm.nih.gov/UniGene/Hs.Home.html. Information on map position within the Unigene database is imported from several sources, including the Oniline Mendelian Inheritance in Man (OMIM, http://www.ncbi.nlm.nih.gov/Omim/searchomim.html), The Genome Database (http://gdb.infobiogen.fr/gdb/simpleSearch.html), and the Whitehead Institute human physical map (http://carbon.wi.mit.edu:8000/cgi-bin/contig/sts_info?database=release).

[0791] Once a cytogenetic region has been identified by one of these approaches, disease association can be established by searching OMIM with the cytogenetic location. OMIM maintains a searchable catalog of cytogenetic map locations organized by disease. A thorough search of available literature for the cytogenetic region is also made using Medline (http://www.ncbi.nlm.nih.gov/PubMed/medline.html). As noted above, references for association of the mapped sites with chromosomal abnormalities found in human cancer can be found in: Knuutila, et al., Am J Pathol, 1998, 152: 1107-1123.

### Example 8b

### Candidate Single Nucleotide Polymorphisms (SNPs) (Table 3)

[0792] Materials and Methods

[0793] The most common variations in human DNA are single nucleotide polymorphisms (SNPs), which occur approximately once every 100 to 300 bases. Because SNPs are expected to facilitate large-scale association genetics studies, there has recently been great interest in SNP discovery and detection. Candidate SNPs for the genes in this patent were identified by blastn searching the nucleic acid sequences against the public database of sequences containing documented SNPs (dbSNP: sequence files were downloaded from ftp://ncbi.nlm.nih.gov/SNP/human/rs-fasta/ and ftp://ncbi.nlh.nih.gov/SNP/human/ss-fasta/ and used to create a blast database). dbSNP accession numbers for the SNP-containing sequences are given. SNPs were also identified by comparing several databases of expressed genes (dbEST, NRNA) and genomic sequence (i.e., NRNA) for single basepair mismatches. The results are shown in Table 3. These are candidate SNPs—their actual frequency in the human population was not determined. The code below is standard for representing DNA sequence:

G = Guanosine
A = Adenosine
T = Thymidine
C = Cytidine
R = G or A, puRine
Y = C or T, pYrimidine
K = G or T, Keto
W = A or T, Weak (2 H-bonds)
S = C or G, Strong (3 H-bonds)
M = A or C, aMino
B = C, G or T (i.e., not A)
D = A, G or T (i.e., not C)
H = A, C or T (i.e., not G)
V = A, C or G (i.e., not T)
N = A, C, G or T, aNy
X = A, C, G or T
complementary G A T C R Y W S K M B V D H N X
DNA +−+−+−+−+−+−+−+−+−+−+−+−+−+−+−+
strands C T A G Y R S W M K V B H D N X

[0794] For example, if two versions of a gene exist, one with a “C” at a given position, and a second one with a “T: at the same position, then that position is represented as a Y, which means C or T.

Results

[0795] A single nucleotide polymorphism in CRIK, SEQ ID NO: 1, SEQ ID NO: 67, occurs at nucleotide position 2924. The polymorphism results in the following SNP: R (A/G). The nucleotide in the patent sequence is “A.” The SNP occurs within the following region (UTR or amino acid number): 958. The SNP has the following effect on the coding sequence of the gene (amino acid change or silent): silent. The amino acid at this position in the patent sequence is “T.” The dbSNP accession number for this SNP is gnl|dbSNP|ss1337340_allelePos=258.

[0796] A single nucleotide polymorphism in CRIK, SEQ ID NO: 1, SEQ ID NO: 67, occurs at nucleotide position 3377. The polymorphism results in the following SNP: R (A/G). The nucleotide in the patent sequence is “A.” The SNP occurs within the following region (UTR or amino acid number): 1109. The SNP has the following effect on the coding sequence of the gene (amino acid change or silent): silent. The amino acid at this position in the patent sequence is “R.” The dbSNP accession number for this SNP is gnl|dbSNP|ss1631893_allelePos=310.

[0797] A single nucleotide polymorphism in CRIK, SEQ ID NO: 1, SEQ ID NO: 67, occurs at nucleotide position 4085. The polymorphism results in the following SNP: Y (C/T). The nucleotide in the patent sequence is “C.” The SNP occurs within the following region (UTR or amino acid number): 1345. The SNP has the following effect on the coding sequence of the gene (amino acid change or silent): silent. The amino acid at this position in the patent sequence is “S.” The dbSNP accession number for this SNP is gnl|dbSNP|ss1631886_allelePos=605.

[0798] A single nucleotide polymorphism in DMPK2, SEQ ID NO: 2, SEQ ID NO: 68, occurs at nucleotide position 5050. The polymorphism results in the following SNP: Y (C/T). The nucleotide in the patent sequence is “C.” The SNP occurs within the following region (UTR or amino acid number): 3′ UTR. The dbSNP accession number for this SNP is gnl|dbSNP|ss1752530_allelePos=201.

[0799] A single nucleotide polymorphism in DMPK2, SEQ ID NO: 2, SEQ ID NO: 68, occurs at nucleotide position 1139. The polymorphism results in the following SNP: R (A/G). The nucleotide in the patent sequence is “G.” The SNP occurs within the following region (UTR or amino acid number): 358. The SNP has the following effect on the coding sequence of the gene (amino acid change or silent): silent. The amino acid at this position in the patent sequence is “G.” The dbSNP accession number for this SNP is gnl|dbSNP|ss1754079 allelePos=201.

[0800] A single nucleotide polymorphism in MAST3, SEQ ID NO: 3, SEQ ID NO: 69, occurs at nucleotide position 2900. The polymorphism results in the following SNP: Y (C/T). The nucleotide in the patent sequence is “C.” The SNP occurs within the following region (UTR or amino acid number): 955. The SNP has the following effect on the coding sequence of the gene (amino acid change or silent): silent. The amino acid at this position in the patent sequence is “D.” The dbSNP accession number for this SNP is gnl|dbSNP|ss1846926_allelePos=432.

[0801] A single nucleotide polymorphism in MAST3, SEQ ID NO: 3, SEQ ID NO: 69, occurs at nucleotide position 623. The polymorphism results in the following SNP: Y (C/T). The nucleotide in the patent sequence is “C.” The SNP occurs within the following region (UTR or amino acid number): 196. The SNP has the following effect on the coding sequence of the gene (amino acid change or silent): silent. The amino acid at this position in the patent sequence is “H.” The dbSNP accession number for this SNP is gnl|dbSNP|ss88979_allelePos=67.

[0802] A single nucleotide polymorphism in MAST205, SEQ ID NO: 4, SEQ ID NO: 70, occurs at nucleotide position 2739. The polymorphism results in the following SNP: R (A/G). The nucleotide in the patent sequence is “A.” The SNP occurs within the following region (UTR or amino acid number): 913. The SNP has the following effect on the coding sequence of the gene (amino acid change or silent): silent. The amino acid at this position in the patent sequence is “S.” The dbSNP accession number for this SNP is gnl|dbSNP|ss1363030-allelePos=144.

[0803] A single nucleotide polymorphism in MAST205, SEQ ID NO: 4, SEQ ID NO: 70, occurs at nucleotide position 25. The polymorphism results in the following SNP: Y (C/T). The nucleotide in the patent sequence is “C.” The SNP occurs within the following region (UTR or amino acid number): 9. The SNP has the following effect on the coding sequence of the gene (amino acid change or silent): R/stop. The amino acid at this position in the patent sequence is “R.” The dbSNP accession number for this SNP is gnl|dbSNP|ss133576_allelePos=22.

[0804] A single nucleotide polymorphism in MAST205, SEQ ID NO: 4, SEQ ID NO: 70, occurs at nucleotide position 5303. The polymorphism results in the following SNP: Y (C/T). The nucleotide in the patent sequence is “C.” The SNP occurs within the following region (UTR or amino acid number): 1768. The SNP has the following effect on the coding sequence of the gene (amino acid change or silent): S/F. The amino acid at this position in the patent sequence is “S.” The dbSNP accession number for this SNP is gnl|dbSNP|ss1529170_allelePos=51.

[0805] A single nucleotide polymorphism in MAST205, SEQ ID NO: 4, SEQ ID NO: 70, occurs at nucleotide position 4652. The polymorphism results in the following SNP: R (A/G). The nucleotide in the patent sequence is “A.” The SNP occurs within the following region (UTR or amino acid number): 1551. The SNP has the following effect on the coding sequence of the gene (amino acid change or silent): D/G. The amino acid at this position in the patent sequence is “D.” The dbSNP accession number for this SNP is gnl|dbSNP|ss1529101_allelePos=5.

[0806] A single nucleotide polymorphism in MAST205, SEQ ID NO: 4, SEQ ID NO: 70, occurs at nucleotide position 3590. The polymorphism results in the following SNP: R (A/G). The nucleotide in the patent sequence is “A.” The SNP occurs within the following region (UTR or amino acid number): 1197. The SNP has the following effect on the coding sequence of the gene (amino acid change or silent): K/R. The amino acid at this position in the patent sequence is “K.” The dbSNP accession number for this SNP is gnl|dbSNP|ss1529096_allelePos=51.

[0807] A single nucleotide polymorphism in MAST205, SEQ ID NO: 4, SEQ ID NO: 70, occurs at nucleotide position 156. The polymorphism results in the following SNP: R (A/G). The nucleotide in the patent sequence is “G.” The SNP occurs within the following region (UTR or amino acid number): 52. The SNP has the following effect on the coding sequence of the gene (amino acid change or silent): silent. The amino acid at this position in the patent sequence is “A.” The dbSNP accession number for this SNP is gnl|dbSNP|ss1608593_allelePos=756.

[0808] A single nucleotide polymorphism in MAST205, SEQ ID NO: 4, SEQ ID NO: 70, occurs at nucleotide position 162. The polymorphism results in the following SNP: S(C/G). The nucleotide in the patent sequence is “C.” The SNP occurs within the following region (UTR or amino acid number): 54. The SNP has the following effect on the coding sequence of the gene (amino acid change or silent): silent. The amino acid at this position in the patent sequence is “P.” The dbSNP accession number for this SNP is gnl|dbSNP|ss497486_allelePos=201.

[0809] A single nucleotide polymorphism in MASTL, SEQ ID NO: 5, SEQ ID NO: 71, occurs at nucleotide position 3831. The polymorphism results in the following SNP: Y (C/T). The nucleotide in the patent sequence is “T.” The SNP occurs within the following region (UTR or amino acid number): 3′ UTR. The dbSNP accession number for this SNP is gnl|dbSNP|ss1363_allelePos=40.

[0810] A single nucleotide polymorphism in PKC_eta, SEQ ID NO: 6, SEQ ID NO: 72, occurs at nucleotide position 1840. The polymorphism results in the following SNP: Y (C/T). The nucleotide in the patent sequence is “T.” The SNP occurs within the following region (UTR or amino acid number): 558. The SNP has the following effect on the coding sequence of the gene (amino acid change or silent): silent. The amino acid at this position in the patent sequence is “N.” The dbSNP accession number for this SNP is gnl|dbSNP|ss1000395_allelePos=101.

[0811] A single nucleotide polymorphism in PKC-eta, SEQ ID NO: 6, SEQ ID NO: 72, occurs at nucleotide position 1239. The polymorphism results in the following SNP: Y (C/T). The nucleotide in the patent sequence is “T.” The SNP occurs within the following region (UTR or amino acid number): 358. The SNP has the following effect on the coding sequence of the gene (amino acid change or silent): T/I. The amino acid at this position in the patent sequence is “I.” The dbSNP accession number for this SNP is gnl|dbSNP|ss1472906_allelePos=327.

[0812] A single nucleotide polymorphism in PKC_eta, SEQ ID NO: 6, SEQ ID NO: 72, occurs at nucleotide position 2288. The polymorphism results in the following SNP: S(C/G). The nucleotide in the patent sequence is “C.” The SNP occurs within the following region (UTR or amino acid number): 3′UTR. The dbSNP accession number for this SNP is gnl|dbSNP|ss1548761_allelePos=51.

[0813] A single nucleotide polymorphism in PKC_eta, SEQ ID NO: 6, SEQ ID NO: 72, occurs at nucleotide position 681. The polymorphism results in the following SNP: R (A/G). The nucleotide in the patent sequence is “A.” The SNP occurs within the following region (UTR or amino acid number): 172. The SNP has the following effect on the coding sequence of the gene (amino acid change or silent): H/G. The amino acid at this position in the patent sequence is “H.” The dbSNP accession number for this SNP is gnl|dbSNP|ss1509877_allelePos=51.

[0814] A single nucleotide polymorphism in MSK1, SEQ ID NO: 8, SEQ ID NO: 74, occurs at nucleotide position 3186. The polymorphism results in the following SNP: Y (C/T). The nucleotide in the patent sequence is “C.” The SNP occurs within the following region (UTR or amino acid number): 3′ UTR. The dbSNP accession number for this SNP is gnl|dbSNP|ss2025310_allelePos=201.

[0815] A single nucleotide polymorphism in MSK1, SEQ ID NO: 8, SEQ ID NO: 74, occurs at nucleotide position 3658. The polymorphism results in the following SNP: R (A/G). The nucleotide in the patent sequence is “A.” The SNP occurs within the following region (UTR or amino acid number): 3′ UTR. The dbSNP accession number for this SNP is gnl|dbSNP|ss1530678_allelePos=5.

[0816] A single nucleotide polymorphism in MSK1, SEQ ID NO: 8, SEQ ID NO: 74, occurs at nucleotide position 3769. The polymorphism results in the following SNP: R (A/G). The nucleotide in the patent sequence is “A.” The SNP occurs within the following region (UTR or amino acid number): 3′ UTR. The dbSNP accession number for this SNP is gnl|dbSNP|ss1530679_allelePos=51.

[0817] A single nucleotide polymorphism in MSK1, SEQ ID NO: 8, SEQ ID NO: 74, occurs at nucleotide position 3432. The polymorphism results in the following SNP: K (G/T). The nucleotide in the patent sequence is “T.” The SNP occurs within the following region (UTR or amino acid number): 3′ UTR. The dbSNP accession number for this SNP is gnl|dbSNP|ss1530677_allelePos=51.

[0818] A single nucleotide polymorphism in MSK1, SEQ ID NO: 8, SEQ ID NO: 74, occurs at nucleotide position 3779. The polymorphism results in the following SNP: K (G/T). The nucleotide in the patent sequence is “T.” The SNP occurs within the following region (UTR or amino acid number): 3′ UTR. The dbSNP accession number for this SNP is gnl|dbSNP|ss1530680_allelePos=51.

[0819] A single nucleotide polymorphism in YANK3, SEQ ID NO: 9, SEQ ID NO: 75, occurs at nucleotide position 1852. The polymorphism results in the following SNP: Y (C/T). The nucleotide in the patent sequence is “C.” The SNP occurs within the following region (UTR or amino acid number): 3′ UTR. The dbSNP accession number for this SNP is gnl|dbSNP|ss18125-allelePos=101.

[0820] A single nucleotide polymorphism in YANK3, SEQ ID NO: 9, SEQ ID NO: 75, occurs at nucleotide position 1895. The polymorphism results in the following SNP: R (A/G). The nucleotide in the patent sequence is “A.” The SNP occurs within the following region (UTR or amino acid number): 3′ UTR. The dbSNP accession number for this SNP is gnl|dbSNP|ss1517863_allelePos=5.

[0821] A single nucleotide polymorphism in YANK3, SEQ ID NO: 9, SEQ ID NO: 75, occurs at nucleotide position 2021. The polymorphism results in the following SNP: M (A/C). The nucleotide in the patent sequence is “A.” The SNP occurs within the following region (UTR or amino acid number): 3′ UTR. The dbSNP accession number for this SNP is gnl|dbSNP|ss1517886_allelePos=51.

[0822] A single nucleotide polymorphism in MARK2, SEQ ID NO: 10, SEQ ID NO: 76, occurs at nucleotide position 2570. The polymorphism results in the following SNP: Y (C/T). The nucleotide in the patent sequence is “C.” The SNP occurs within the following region (UTR or amino acid number): 724. The SNP has the following effect on the coding sequence of the gene (amino acid change or silent): silent. The amino acid at this position in the patent sequence is “S.” The dbSNP accession number for this SNP is gnl|dbSNP|ss1121403_allelePos=101.

[0823] A single nucleotide polymorphism in MARK2, SEQ ID NO: 10, SEQ ID NO: 76, occurs at nucleotide position 2615. The polymorphism results in the following SNP: R (A/G). The nucleotide in the patent sequence is “G.” The SNP occurs within the following region (UTR or amino acid number): 739. The SM has the following effect on the coding sequence of the gene (amino acid change or silent): silent. The amino acid at this position in the patent sequence is “P.” The dbSNP accession number for this SNP is gnl|dbSNP|ss1121404_allelePos=101.

[0824] A single nucleotide polymorphism in MARK2, SEQ ID NO: 10, SEQ ID NO: 76, occurs at nucleotide position 1641. The polymorphism results in the following SNP: S(C/G). The nucleotide in the patent sequence is “G.” The SNP occurs within the following region (UTR or amino acid number): 415. The SNP has the following effect on the coding sequence of the gene (amino acid change or silent): P/A. The amino acid at this position in the patent sequence is “A.” The dbSNP accession number for this SNP is gnl|dbSNP|ss1537647_allelePos=51.

[0825] A single nucleotide polymorphism in MARK2, SEQ ID NO: 10, SEQ ID NO: 76, occurs at nucleotide position 1547. The polymorphism results in the following SNP: R (A/G). The nucleotide in the patent sequence is “A.” The SNP occurs within the following region (UTR or amino acid number): 383. The SNP has the following effect on the coding sequence of the gene (amino acid change or silent): silent. The amino acid at this position in the patent sequence is “L.” The dbSNP accession number for this SNP is gnl|dbSNP|rs1057176_allelePos=51.

[0826] A single nucleotide polymorphism in NuaK2, SEQ ID NO: 11, SEQ ID NO: 77, occurs at nucleotide position 1670. The polymorphism results in the following SNP: S(C/G). The nucleotide in the patent sequence is “G.” The SNP occurs within the following region (UTR or amino acid number): 538. The SNP has the following effect on the coding sequence of the gene (amino acid change or silent): silent. The amino acid at this position in the patent sequence is “L.” The dbSNP accession number for this SNP is gnl|dbSNP|ss1295001_allelePos=93.

[0827] A single nucleotide polymorphism in NuaK2, SEQ ID NO: 11, SEQ ID NO: 77, occurs at nucleotide position 1727. The polymorphism results in the following SNP: R (A/G). The nucleotide in the patent sequence is “G.” The SNP occurs within the following region (UTR or amino acid number): 557. The SNP has the following effect on the coding sequence of the gene (amino acid change or silent): silent. The amino acid at this position in the patent sequence is “L.” The dbSNP accession number for this SNP is gnl|dbSNP|ss1295000_allelePos=36.

[0828] A single nucleotide polymorphism in MARK4, SEQ ID NO: 13, SEQ ID NO: 79, occurs at nucleotide position 2916. The polymorphism results in the following SNP: R (A/G). The nucleotide in the patent sequence is “G.” The SNP occurs within the following region (UTR or amino acid number): 3′ UTR. The dbSNP accession number for this SNP is gnl|dbSNP|ss1967699_allelePos=201.

[0829] A single nucleotide polymorphism in MARK4, SEQ ID NO: 13, SEQ ID NO: 79, occurs at nucleotide position 3032. The polymorphism results in the following SNP: Y (C/T). The nucleotide in the patent sequence is “C.” The SNP occurs within the following region (UTR or amino acid number): 3′ UTR. The dbSNP accession number for this SNP is gnl|dbSNP|ss1967700_allelePos=242.

[0830] A single nucleotide polymorphism in MARK4, SEQ ID NO: 13, SEQ ID NO: 79, occurs at nucleotide position 1699. The polymorphism results in the following SNP: Y (C/T). The nucleotide in the patent sequence is “C.” The SNP occurs within the following region (UTR or amino acid number): 561. The SNP has the following effect on the coding sequence of the gene (amino acid change or silent): silent. The amino acid at this position in the patent sequence is “R.” The dbSNP accession number for this SNP is gnl|dbSNP|ss1967693_allelePos=201.

[0831] A single nucleotide polymorphism in MARK4, SEQ ID NO: 13, SEQ ID NO: 79, occurs at nucleotide position 3092. The polymorphism results in the following SNP: R (A/G). The nucleotide in the patent sequence is “G.” The SNP occurs within the following region (UTR or amino acid number): 3′ UTR. The dbSNP accession number for this SNP is gnl|dbSNP|ss1512875_allelePos=51.

[0832] A single nucleotide polymorphism in PI2, SEQ ID NO: 15, SEQ ID NO: 81, occurs at nucleotide position 630. The polymorphism results in the following SNP: R (A/G). The nucleotide in the patent sequence is “A.” The SNP occurs within the following region (UTR or amino acid number): 210. The SNP has the following effect on the coding sequence of the gene (amino acid change or silent): silent. The amino acid at this position in the patent sequence is “E.” The dbSNP accession number for this SNP is gnl|dbSNP|ss1525746_allelePos=5.

[0833] A single nucleotide polymorphism in PIM2, SEQ ID NO: 15, SEQ ID NO: 81, occurs at nucleotide position 1749. The polymorphism results in the following SNP: Y (C/T). The nucleotide in the patent sequence is “T.” The SNP occurs within the following region (UTR or amino acid number): 3′ UTR. The dbSNP accession number for this SNP is gnl|dbSNP|ss1525747_allelePos=51.

[0834] A single nucleotide polymorphism in PIM2, SEQ ID NO: 15, SEQ ID NO: 81, occurs at nucleotide position 1990. The polymorphism results in the following SNP: Y (C/T). The nucleotide in the patent sequence is “T.” The SNP occurs within the following region (UTR or amino acid number): 3′ UTR. The dbSNP accession number for this SNP is gnl|dbSNP|ss1525754_allelePos=51.

[0835] A single nucleotide polymorphism in PIM3, SEQ ID-NO: 16, SEQ ID NO: 82, occurs at nucleotide position 2057. The polymorphism results in the following SNP: Y (C/T). The nucleotide in the patent sequence is “T.” The SNP occurs within the following region (UTR or amino acid number): 3′ UTR. The dbSNP accession number for this SNP is gnl|dbSNP|ss1548948_allelePos=51.

[0836] A single nucleotide polymorphism in PIM3, SEQ ID NO: 16, SEQ ID NO: 82, occurs at nucleotide position 1269. The polymorphism results in the following SNP: Y (C/T). The nucleotide in the patent sequence is “C.” The SNP occurs within the following region (UTR or amino acid number): 278. The SNP has the following effect on the coding sequence of the gene (amino acid change or silent): silent. The amino acid at this position in the patent sequence is “P.” The dbSNP accession number for this SNP is gnl|dbSNP|ss1511148_allelePos=51.

[0837] A single nucleotide polymorphism in PIM3, SEQ ID NO: 16, SEQ ID NO: 82, occurs at nucleotide position 2362. The polymorphism results in the following SNP: R (A/G). The nucleotide in the patent sequence is “G.” The SNP occurs within the following region (UTR or amino acid number): 3′ UTR. The dbSNP accession number for this SNP is gnl|dbSNP|ss1511284_allelePos=51.

[0838] A single nucleotide polymorphism in TSSK4, SEQ ID NO: 17, SEQ ID NO: 83, occurs at nucleotide position 1203. The polymorphism results in the following SNP: R (A/G). The nucleotide in the patent sequence is “A.” The SNP occurs within the following region (UTR or amino acid number): 196. The SNP has the following effect on the coding sequence of the gene (amino acid change or silent): Q/R. The amino acid at this position in the patent sequence is “Q.” The dbSNP accession number for this SNP is gnl|dbSNP|ss1975997_allelePos=201.

[0839] A single nucleotide polymorphism in TSSK4, SEQ ID NO: 17, SEQ ID NO: 83, occurs at nucleotide position 152. The polymorphism results in the following SNP: M (A/C). The nucleotide in the patent sequence is “C.” The SNP occurs within the following region (UTR or amino acid number): 5′ UTR. The dbSNP accession number for this SNP is gnl|dbSNP|ss1588747_allelePos=749.

[0840] A single nucleotide polymorphism in TSSK4, SEQ ID NO: 17, SEQ ID NO: 83, occurs at nucleotide position 141. The polymorphism results in the following SNP: R (A/G). The nucleotide in the patent sequence is “A.” The SNP occurs within the following region (UTR or amino acid number): 5′ UTR. The dbSNP accession number for this SNP is gnl|dbSNP|ss1588746_allelePos=738.

[0841] A single nucleotide polymorphism in TSSK4, SEQ ID NO: 17, SEQ ID NO: 83, occurs at nucleotide position 238. The polymorphism results in the following SNP: R (A/G). The nucleotide in the patent sequence is “G.” The SNP occurs within the following region (UTR or amino acid number): 5′ UTR. The dbSNP accession number for this SNP is gnl|dbSNP|ss1211997_allelePos=524.

[0842] A single nucleotide polymorphism in TSSK4, SEQ ID NO: 17, SEQ ID NO: 83, occurs at nucleotide position 84. The polymorphism results in the following SNP: Y (C/T). The nucleotide in the patent sequence is “T.” The SNP occurs within the following region (UTR or amino acid number): 5′ UTR. The dbSNP accession number for this SNP is gnl|dbSNP|ss934600_allelePos=307.

[0843] A single nucleotide polymorphism in TSSK4, SEQ ID NO: 17, SEQ ID NO: 83, occurs at nucleotide position 281. The polymorphism results in the following SNP: R (A/G). The nucleotide in the patent sequence is “G.” The SNP occurs within the following region (UTR or amino acid number): 5′ UTR. The dbSNP accession number for this SNP is gnl|dbSNP|ss1747635_allelePos=2506.

[0844] A single nucleotide polymorphism in TSSK4, SEQ ID NO: 17, SEQ ID NO: 83, occurs at nucleotide position 236. The polymorphism results in the following SNP: Y (C/T). The nucleotide in the patent sequence is “C.” The SNP occurs within the following region (UTR or amino acid number): 5′ UTR. The dbSNP accession number for this SNP is gnl|dbSNP|ss1747634_allelePos=2461.

[0845] A single nucleotide polymorphism in TSSK4, SEQ ID NO: 17, SEQ ID NO: 83, occurs at nucleotide position 136. The polymorphism results in the following SNP: Y (C/T). The nucleotide in the patent sequence is “C.” The SNP occurs within the following region (UTR or amino acid number): 5′ UTR. The dbSNP accession number for this SNP is gnl|dbSNP|ss2056655_allelePos=355.

[0846] A single nucleotide polymorphism in TSSK4, SEQ ID NO: 17, SEQ ID NO: 83, occurs at nucleotide position 22. The polymorphism results in the following SNP: Y (C/T). The nucleotide in the patent sequence is “C.” The SNP occurs within the following region (UTR or amino acid number): 5′ UTR. The dbSNP accession number for this SNP is gnl|dbSNP|ss45790_allelePos=479.

[0847] A single nucleotide polymorphism in TSSK4, SEQ ID NO: 17, SEQ ID NO: 83, occurs at nucleotide position 243. The polymorphism results in the following SNP: R (A/G). The nucleotide in the patent sequence is “G.” The SNP occurs within the following region (UTR or amino acid number): 5′ UTR. The dbSNP accession number for this SNP is gnl|dbSNP|ss2061784_allelePos=1157.

[0848] A single nucleotide polymorphism in TSSK4, SEQ ID NO: 17, SEQ ID NO: 83, occurs at nucleotide position 226. The polymorphism results in the following SNP: Y (C/T). The nucleotide in the patent sequence is “C.” The SNP occurs within the following region (UTR or amino acid number): 5′ UTR. The dbSNP accession number for this SNP is gnl|dbSNP|ss2061783_allelePos=1140.

[0849] A single nucleotide polymorphism in TSSK4, SEQ ID NO: 17, SEQ ID NO: 83, occurs at nucleotide position 47. The polymorphism results in the following SNP: R (A/G). The nucleotide in the patent sequence is “A.” The SNP occurs within the following region (UTR or amino acid number): 5′ UTR. The dbSNP accession number for this SNP is gnl|dbSNP|ss1990388_allelePos=1229.

[0850] A single nucleotide polymorphism in TSSK4, SEQ ID NO: 17, SEQ ID NO: 83, occurs at nucleotide position 158. The polymorphism results in the following SNP: W (A/T). The nucleotide in the patent sequence is “A.” The SNP occurs within the following region (UTR or amino acid number): 5′ UTR. The dbSNP accession number for this SNP is gnl|dbSNP|ss1911350_allelePos=370.

[0851] A single nucleotide polymorphism in TSSK4, SEQ ID NO: 17, SEQ ID NO: 83, occurs at nucleotide position 77. The polymorphism results in the following SNP: Y (C/T). The nucleotide in the patent sequence is “C.” The SNP occurs within the following region (UTR or amino acid number): 5′ UTR. The dbSNP accession number for this SNP is gnl|dbSNP|ss1909793_allelePos=506.

[0852] A single nucleotide polymorphism in TSSK4, SEQ ID NO: 17, SEQ ID NO: 83, occurs at nucleotide position 137. The polymorphism results in the following SNP: R (A/G). The nucleotide in the patent sequence is “G.” The SNP occurs within the following region (UTR or amino acid number): 5′ UTR. The dbSNP accession number for this SNP is gnl|dbSNP|ss1908525_allelePos=1475.

[0853] A single nucleotide polymorphism in TSSK4, SEQ ID NO: 17, SEQ ID NO: 83, occurs at nucleotide position 44. The polymorphism results in the following SNP: Y (C/T). The nucleotide in the patent sequence is “T.” The SNP occurs within the following region (UTR or amino acid number): 5′ UTR. The dbSNP accession number for this SNP is gnl|dbSNP|ss1897673_allelePos=1677.

[0854] A single nucleotide polymorphism in TSSK4, SEQ ID NO: 17, SEQ ID NO: 83, occurs at nucleotide position 11. The polymorphism results in the following SNP: R (A/G). The nucleotide in the patent sequence is “A.” The SNP occurs within the following region (UTR or amino acid number): 5′ UTR. The dbSNP accession number for this SNP is gnl|dbSNP|ss1857878_allelePos=1145.

[0855] A single nucleotide polymorphism in TSSK4, SEQ ID NO: 17, SEQ ID NO: 83, occurs at nucleotide position 223. The polymorphism results in the following SNP: Y (C/T). The nucleotide in the patent sequence is “C.” The SNP occurs within the following region (UTR or amino acid number): 5′ UTR. The dbSNP accession number for this SNP is gnl|dbSNP|ss1816570_allelePos=267.

[0856] A single nucleotide polymorphism in TSSK4, SEQ ED NO: 17, SEQ ID NO: 83, occurs at nucleotide position 85. The polymorphism results in the following SNP: R (A/G). The nucleotide in the patent sequence is “G.” The SNP occurs within the following region (UTR or amino acid number): 5′ UTR. The dbSNP accession number for this SNP is gnl|dbSNP|ss1799649_allelePos=306.

[0857] A single nucleotide polymorphism in TSSK4, SEQ ID NO: 17, SEQ ID NO: 83, occurs at nucleotide position 280. The polymorphism results in the following SNP: Y (C/T). The nucleotide in the patent sequence is “C.” The SNP occurs within the following region (UTR or amino acid number): 5′ UTR. The dbSNP accession number for this SNP is gnl|dbSNP|ss1732367_allelePos=496.

[0858] A single nucleotide polymorphism in TSSK4, SEQ ID NO: 17, SEQ ID NO: 83, occurs at nucleotide position 97. The polymorphism results in the following SNP: Y (C/T). The nucleotide in the patent sequence is “T.” The SNP occurs within the following region (UTR or amino acid number): 5′ UTR. The dbSNP accession number for this SNP is gnl|dbSNP|ss1729216_allelePos=408.

[0859] A single nucleotide polymorphism in TSSK4, SEQ ID NO: 17, SEQ ID NO: 83, occurs at nucleotide position 148. The polymorphism results in the following SNP: Y (C/T). The nucleotide in the patent sequence is “C.” The SNP occurs within the following region (UTR or amino acid number): 5′ UTR. The dbSNP accession number for this SNP is gnl|dbSNP|ss1684407_allelePos=417.

[0860] A single nucleotide polymorphism in CKIL2, SEQ ID NO: 18, SEQ ID NO: 84, occurs at nucleotide position 3889. The polymorphism results in the following SNP: S(C/G). The nucleotide in the patent sequence is “C.” The SNP occurs within the following region (UTR or amino acid number): 1208. The SNP has the following effect on the coding sequence of the gene (amino acid change or silent): H/D. The amino acid at this position in the patent sequence is “H.” The dbSNP accession number for this SNP is gnl|dbSNP|ss1551913_allelePos=51.

[0861] A single nucleotide polymorphism in CKIIar, SEQ ID NO: 22, SEQ ID NO: 88, occurs at nucleotide position 1103. The polymorphism results in the following SNP: M (A/C). The nucleotide in the patent sequence is “C.” The SNP occurs within the following region (UTR or amino acid number): 318. The SNP has the following effect on the coding sequence of the gene (amino acid change or silent): silent. The amino acid at this position in the patent sequence is “A.” The dbSNP accession number for this SNP is gnl|dbSNP|ss1537202_allelePos=51.

[0862] A single nucleotide polymorphism in CKIIar, SEQ ID NO: 22, SEQ ID NO: 88, occurs at nucleotide position 1008. The polymorphism results in the following SNP: M (A/C). The nucleotide in the patent sequence is “C.” The SNP occurs within the following region (UTR or amino acid number): 287. The SNP has the following effect on the coding sequence of the gene (amino acid change or silent): S/R. The amino acid at this position in the patent sequence is “R.” The dbSNP accession number for this SNP is gnl|dbSNP|ss1537192_allelePos=51.

[0863] A single nucleotide polymorphism in CKIIar, SEQ ID NO: 22, SEQ ID NO: 88, occurs at nucleotide position 663. The polymorphism results in the following SNP: Y (C/T). The nucleotide in the patent sequence is “C.” The SNP occurs within the following region (UTR or amino acid number): 172. The SNP has the following effect on the coding sequence of the gene (amino acid change or silent): R/stop. The amino acid at this position in the patent sequence is “R.” The dbSNP accession number for this SNP is gnl|dbSNP|ss1537165_allelePos=51.

[0864] A single nucleotide polymorphism in CKIIar, SEQ ID NO: 22, SEQ ID NO: 88, occurs at nucleotide position 1428. The polymorphism results in the following SNP: M (A/C). The nucleotide in the patent sequence is “A.” The SNP occurs within the following region (UTR or amino acid number): 3′ UTR. The dbSNP accession number for this SNP is gnl|dbSNP|ss1537238_allelePos=51.

[0865] A single nucleotide polymorphism in CKIIar, SEQ ID NO: 22, SEQ ID NO: 88, occurs at nucleotide position 194. The polymorphism results in the following SNP: Y (C/T). The nucleotide in the patent sequence is “T.” The SNP occurs within the following region (UTR or amino acid number): 15. The SNP has the following effect on the coding sequence of the gene (amino acid change or silent): silent. The amino acid at this position in the patent sequence is “V.” The dbSNP accession number for this SNP is gnl|dbSNP|ss5453_allelePos=51.

[0866] A single nucleotide polymorphism in CKIIar, SEQ ID NO: 22, SEQ ID NO: 88, occurs at nucleotide position 1200. The polymorphism results in the following SNP: R (A/G). The nucleotide in the patent sequence is “G.” The SNP occurs within the following region (UTR or amino acid number): 351. The SNP has the following effect on the coding sequence of the gene (amino acid change or silent): M/V. The amino acid at this position in the patent sequence is “V.” The dbSNP accession number for this SNP is gnl|dbSNP|ss1537218_allelePos=5.

[0867] A single nucleotide polymorphism in CKIIar, SEQ ID NO: 22, SEQ ID NO: 88, occurs at nucleotide position 1181. The polymorphism results in the following SNP: R (A/G). The nucleotide in the patent sequence is “A.” The SNP occurs within the following region (UTR or amino acid number): 344. The SNP has the following effect on the coding sequence of the gene (amino acid change or silent): silent. The amino acid at this position in the patent sequence is “T.” The dbSNP accession number for this SNP is gnl|dbSNP|ss1537216_allelePos=51.

[0868] A single nucleotide polymorphism in CKIIar, SEQ ID NO: 22, SEQ ID NO: 88, occurs at nucleotide position 1104. The polymorphism results in the following SNP: W (A/T). The nucleotide in the patent sequence is “A.” The SNP occurs within the following region (UTR or amino acid number): 319. The SNP has the following effect on the coding sequence of the gene (amino acid change or silent): M/L. The amino acid at this position in the patent sequence is “M.” The dbSNP accession number for this SNP is gnl|dbSNP|ss1537203_allelePos=51.

[0869] A single nucleotide polymorphism in DYRK4, SEQ ID NO: 23, SEQ ID NO: 89, occurs at nucleotide position 269. The polymorphism results in the following SNP: R (A/G). The nucleotide in the patent sequence is “G.” The SNP occurs within the following region (UTR or amino acid number): 90. The SNP has the following effect on the coding sequence of the gene (amino acid change or silent): R/H. The amino acid at this position in the patent sequence is “R.” The dbSNP accession number for this SNP is gnl|dbSNP|ss88136_allelePos=155.

[0870] A single nucleotide polymorphism in HIPK1, SEQ ID NO: 24, SEQ ID NO: 90, occurs at nucleotide position 4114. The polymorphism results in the following SNP: Y (C/T). The nucleotide in the patent sequence is “T.” The SNP occurs within the following region (UTR or amino acid number): 3′ UTR. The dbSNP accession number for this SNP is gnl|dbSNP|ss12250_allelePos=101.

[0871] A single nucleotide polymorphism in BIKE, SEQ ID NO: 26, SEQ ID NO: 92, occurs at nucleotide position 1606. The polymorphism results in the following SNP: R (A/G). The nucleotide in the patent sequence is “A.” The SNP occurs within the following region (UTR or amino acid number): 468. The SNP has the following effect on the coding sequence of the gene (amino acid change or silent): silent. The amino acid at this position in the patent sequence is “Q.” The dbSNP accession number for this SNP is gnl|dbSNP|ss1509438_allelePos=51.

[0872] A single nucleotide polymorphism in NEK10, SEQ ID NO: 27, SEQ ID NO: 93, occurs at nucleotide position 1149. The polymorphism results in the following SNP: S(C/G). The nucleotide in the patent sequence is “G.” The SNP occurs within the following region (UTR or amino acid number): 325. The SNP has the following effect on the coding sequence of the gene (amino acid change or silent): T/S. The amino acid at this position in the patent sequence is “S.” The dbSNP accession number for this SNP is gnl|dbSNP|ss727804_allelePos=20.

[0873] A single nucleotide polymorphism in NEK10, SEQ ID NO: 27, SEQ ID NO: 93, occurs at nucleotide position 1849. The polymorphism results in the following SNP: R (A/G). The nucleotide in the patent sequence is “G.” The SNP occurs within the following region (UTR or amino acid number): 558. The SNP has the following effect on the coding sequence of the gene (amino acid change or silent): silent. The amino acid at this position in the patent sequence is “G.” The dbSNP accession number for this SNP is gnl|dbSNP|ss1891242_allelePos=201.

[0874] A single nucleotide polymorphism in NEK10, SEQ ID NO: 27, SEQ ID NO: 93, occurs at nucleotide position 2967. The polymorphism results in the following SNP: R (A/G). The nucleotide in the patent sequence is “G.” The SNP occurs within the following region (UTR or amino acid number): 931. The SNP has the following effect on the coding sequence of the gene (amino acid change or silent): N/S. The amino acid at this position in the patent sequence is “S.” The dbSNP accession number for this SNP is gnl|dbSNP|ss1325417_allelePos=338.

[0875] A single nucleotide polymorphism in NEK1, SEQ ID NO: 29, SEQ ID NO: 95, occurs at nucleotide position 5063. The polymorphism results in the following SNP: R (A/G). The nucleotide in the patent sequence is “A.” The SNP occurs within the following region (UTR or amino acid number): 3′ UTR. The dbSNP accession number for this SNP is gnl|dbSNP|ss1520330_allelePos=51.

[0876] A single nucleotide polymorphism in NEK1, SEQ ID NO: 29, SEQ ID NO: 95, occurs at nucleotide position 4848. The polymorphism results in the following SNP: Y (C/T). The nucleotide in the patent sequence is “C.” The SNP occurs within the following region (UTR or amino acid number): 3′ UTR. The dbSNP accession number for this SNP is gnl|dbSNP|ss1520329_allelePos=51.

[0877] A single nucleotide polymorphism in NEK3, SEQ ID NO: 30, SEQ ID NO: 96, occurs at nucleotide position 1854. The polymorphism results in the following SNP: S (C/G). The nucleotide in the patent sequence is “C.” The SNP occurs within the following region (UTR or amino acid number): 3′ UTR. The dbSNP accession number for this SNP is gnl|dbSNP|ss3403_allelePos=2.

[0878] A single nucleotide polymorphism in SGKO69, SEQ ID NO: 31, SEQ ID NO: 97, occurs at nucleotide position 1001. The polymorphism results in the following SNP: S(C/G). The nucleotide in the patent sequence is “G.” The SNP occurs within the following region (UTR or amino acid number): 298. The SNP has the following effect on the coding sequence of the gene (amino acid change or silent): P/A. The amino acid at this position in the patent sequence is “A.” The dbSNP accession number for this SNP is gnl|dbSNP|ss1317629_allelePos=393.

[0879] A single nucleotide polymorphism in SGK069, SEQ ID NO: 31, SEQ ID NO: 97, occurs at nucleotide position 323. The polymorphism results in the following SNP: Y (C/T). The nucleotide in the patent sequence is “C.” The SNP occurs within the following region (UTR or amino acid number): 72. The SNP has the following effect on the coding sequence of the gene (amino acid change or silent): R/C. The amino acid at this position in the patent sequence is “R.” The dbSNP accession number for this SNP is gnl|dbSNP|ss1688815_allelePos=201.

[0880] A single nucleotide polymorphism in SGK110, SEQ ID NO: 32, SEQ ID NO: 98, occurs at nucleotide position 299. The polymorphism results in the following SNP: W (A/T). The nucleotide in the patent sequence is “A.” The SNP occurs within the following region (UTR or amino acid number): 1. The SNP has the following effect on the coding sequence of the gene (amino acid change or silent): M/L. The amino acid at this position in the patent sequence is “M.” The dbSNP accession number for this SNP is gnl|dbSNP|ss767141_allelePos=201.

[0881] A single nucleotide polymorphism in SGK110, SEQ ID NO: 32, SEQ ID NO: 98, occurs at nucleotide position 985. The polymorphism results in the following SNP: R (A/G). The nucleotide in the patent sequence is “A.” The SNP occurs within the following region (UTR or amino acid number): 229. The SNP has the following effect on the coding sequence of the gene (amino acid change or silent): silent. The amino acid at this position in the patent sequence is “P.” The dbSNP accession number for this SNP is gnl|dbSNP|ss827468_allelePos=20.

[0882] A single nucleotide polymorphism in SGK110, SEQ ID NO: 32, SEQ ID NO: 98, occurs at nucleotide position 640. The polymorphism results in the following SNP: Y (C/T). The nucleotide in the patent sequence is “C.” The SNP occurs within the following region (UTR or amino acid number): 114. The SNP has the following effect on the coding sequence of the gene (amino acid change or silent): silent. The amino acid at this position in the patent sequence is “L.” The dbSNP accession number for this SNP is gnl|dbSNP|ss661406_allelePos=201.

[0883] A single nucleotide polymorphism in SRPK2, SEQ ID NO: 36, SEQ ID NO: 102, occurs at nucleotide position 2219. The polymorphism results in the following SNP: Y (C/T). The nucleotide in the patent sequence is “C.” The SNP occurs within the following region (UTR or amino acid number): 681. The SNP has the following effect on the coding sequence of the gene (amino acid change or silent): L/F. The amino acid at this position in the patent sequence is “L.” The dbSNP accession number for this SNP is gnl|dbSNP|ss1525084_allelePos=51.

[0884] A single nucleotide polymorphism in SRPK2, SEQ ID NO: 36, SEQ ID NO: 102, occurs at nucleotide position 2047. The polymorphism results in the following SNP: Y (C/T). The nucleotide in the patent sequence is “C.” The SNP occurs within the following region (UTR or amino acid number): 623. The SNP has the following effect on the coding sequence of the gene (amino acid change or silent): silent. The amino acid at this position in the patent sequence is “F.” The dbSNP accession number for this SNP is gnl|dbSNP|ss1525076_allelePos=51.

[0885] A single nucleotide polymorphism in SRPK2, SEQ ID NO: 36, SEQ ID NO: 102, occurs at nucleotide position 2040. The polymorphism results in the following SNP: R (A/G). The nucleotide in the patent sequence is “G.” The SNP occurs within the following region (UTR or amino acid number): 621. The SNP has the following effect on the coding sequence of the gene (amino acid change or silent): Q/R. The amino acid at this position in the patent sequence is “R.” The dbSNP accession number for this SNP is gnl|dbSNP|ss1525074_allelePos=51.

[0886] A single nucleotide polymorphism in SRPK2, SEQ ID NO: 36, SEQ ID NO: 102, occurs at nucleotide position 2035. The polymorphism results in the following SNP: Y (C/T). The nucleotide in the patent sequence is “T.” The SNP occurs within the following region (UTR or amino acid number): 619. The SNP has the following effect on the coding sequence of the gene (amino acid change or silent): silent. The amino acid at this position in the patent sequence is “Y.” The dbSNP accession number for this SNP is gnl|dbSNP|rs1050422_allelePos=51.

[0887] A single nucleotide polymorphism in SRPK2, SEQ ID NO: 36, SEQ ID NO: 102, occurs at nucleotide position 2021. The polymorphism results in the following SNP: M (A/C). The nucleotide in the patent sequence is “C.” The SNP occurs within the following region (UTR or amino acid number): 615. The SNP has the following effect on the coding sequence of the gene (amino acid change or silent): I/L. The amino acid at this position in the patent sequence is “L.” The dbSNP accession number for this SNP is gnl|dbSNP|ss1525069_allelePos=51.

[0888] A single nucleotide polymorphism in SRPK2, SEQ ID NO: 36, SEQ ID NO: 102, occurs at nucleotide position 2014. The polymorphism results in the following SNP: M (A/C). The nucleotide in the patent sequence is “C.” The SNP occurs within the following region (UTR or amino acid number): 612. The SNP has the following effect on the coding sequence of the gene (amino acid change or silent): Q/H. The amino acid at this position in the patent sequence is “H.” The dbSNP accession number for this SNP is gnl|dbSNP|ss1525066_allelePos=51.

[0889] A single nucleotide polymorphism in SRPK2, SEQ ID NO: 36, SEQ ID NO: 102, occurs at nucleotide position 2029. The polymorphism results in the following SNP: R (A/G). The nucleotide in the patent sequence is “A.” The SNP occurs within the following region (UTR or amino acid number): 617. The SNP has the following effect on the coding sequence of the gene (amino acid change or silent): silent. The amino acid at this position in the patent sequence is “G.” The dbSNP accession number for this SNP is gnl|dbSNP|ss1525072_allelePos=51.

[0890] A single nucleotide polymorphism in SRPK2, SEQ ID NO: 36, SEQ ID NO: 102, occurs at nucleotide position 2017. The polymorphism results in the following SNP: Y (C/T). The nucleotide in the patent sequence is “T.” The SNP occurs within the following region (UTR or amino acid number): 613. The SNP has the following effect on the coding sequence of the gene (amino acid change or silent): silent. The amino acid at this position in the patent sequence is “F.” The dbSNP accession number for this SNP is gnl|dbSNP|ss1525068-allelePos=51.

[0891] A single nucleotide polymorphism in SRPK2, SEQ ID NO: 36, SEQ ID NO: 102, occurs at nucleotide position 2016. The polymorphism results in the following SNP: W (A/T). The nucleotide in the patent sequence is “T.” The SN occurs within the following region (UTR or amino acid number): 613. The SNP has the following effect on the coding sequence of the gene (amino acid change or silent): Y/F. The amino acid at this position in the patent sequence is “F.” The dbSNP accession number for this SNP is gnl|dbSNP|ss1525067_allelePos=51.

[0892] A single nucleotide polymorphism in SRPK2, SEQ ID NO: 36, SEQ ID NO: 102, occurs at nucleotide position 2001. The polymorphism results in the following SNP: R (A/G). The nucleotide in the patent sequence is “G.” The SNP occurs within the following region (UTR or amino acid number): 608. The SNP has the following effect on the coding sequence of the gene (amino acid change or silent): N/S. The amino acid at this position in the patent sequence is “S.” The dbSNP accession number for this SNP is gnl|dbSNP|ss1525064-allelePos=51.

[0893] A single nucleotide polymorphism in SRPK2, SEQ ID NO: 36, SEQ ID NO: 102, occurs at nucleotide position 1999. The polymorphism results in the following SNP: S(C/G). The nucleotide in the patent sequence is “C.” The SNP occurs within the following region (UTR or amino acid number): 607. The SNP has the following effect on the coding sequence of the gene (amino acid change or silent): silent. The amino acid at this position in the patent sequence is “G.” The dbSNP accession number for this SNP is gnl|dbSNP|ss1525063_allelePos=51.

[0894] A single nucleotide polymorphism in SRPK2, SEQ ID NO: 36, SEQ ID NO: 102, occurs at nucleotide position 1996. The polymorphism results in the following SNP: R (A/G). The nucleotide in the patent sequence is “A.” The SNP occurs within the following region (UTR or amino acid number): 606. The SNP has the following effect on the coding sequence of the gene (amino acid change or silent): silent. The amino acid at this position in the patent sequence is “A.” The dbSNP accession number for this SNP is gnl|dbSNP|ss1525062_allelePos=51.

[0895] A single nucleotide polymorphism in SRPK2, SEQ ID NO: 36, SEQ ID NO: 102, occurs at nucleotide position 1969. The polymorphism results in the following SNP: Y (C/T). The nucleotide in the patent sequence is “C.” The SNP occurs within the following region (UTR or amino acid number): 597. The SNP has the following effect on the coding sequence of the gene (amino acid change or silent): silent. The amino acid at this position in the patent sequence is “D.” The dbSNP accession number for this SNP is gnl|dbSNP|ss1525061_allelePos=51.

[0896] A single nucleotide polymorphism in SRPK2, SEQ ID NO: 36, SEQ ID NO: 102, occurs at nucleotide position 2044. The polymorphism results in the following SNP: R (A/G). The nucleotide in the patent sequence is “A.” The SNP occurs within the following region (UTR or amino acid number): 622. The SNP has the following effect on the coding sequence of the gene (amino acid change or silent): silent. The amino acid at this position in the patent sequence is “E.” The dbSNP accession number for this SNP is gnl|dbSNP|ss1525075_allelePos=51.

[0897] A single nucleotide polymorphism in SRPK2, SEQ ID NO: 36, SEQ ID NO: 102, occurs at nucleotide position 2023. The polymorphism results in the following SNP: R (A/G). The nucleotide in the patent sequence is “A.” The SNP occurs within the following region (UTR or amino acid number): 615. The SNP has the following effect on the coding sequence of the gene (amino acid change or silent): silent. The amino acid at this position in the patent sequence is “L.” The dbSNP accession number for this SNP is gnl|dbSNP|ss1525072_allelePos=51.

[0898] A single nucleotide polymorphism in TLK1, SEQ ID NO: 37, SEQ ID NO: 103, occurs at nucleotide position 2174. The polymorphism results in the following SNP: W (A/T). The nucleotide in the patent sequence is “A.” The SNP occurs within the following region (UTR or amino acid number): 646. The SNP has the following effect on the coding sequence of the gene (amino acid change or silent): V/D. The amino acid at this position in the patent sequence is “D.” The dbSNP accession number for this SNP is gnl|dbSNP|ss1515391_allelePos=51.

[0899] A single nucleotide polymorphism in TLK1, SEQ ID NO: 37, SEQ ID NO: 103, occurs at nucleotide position 2489. The polymorphism results in the following SNP: R (A/G). The nucleotide in the patent sequence is “A.” The SNP occurs within the following region (UTR or amino acid number): 751. The SNP has the following effect on the coding sequence of the gene (amino acid change or silent): N/S. The amino acid at this position in the patent sequence is “N.” The dbSNP accession number for this SNP is gnl|dbSNP|ss1515399_allelePos=51.

[0900] A single nucleotide polymorphism in TLK1, SEQ ID NO: 37, SEQ ID NO: 103, occurs at nucleotide position 2515. The polymorphism results in the following SNP: M (A/C). The nucleotide in the patent sequence is “A.” The SNP occurs within the following region (UTR or amino acid number): 760. The SNP has the following effect on the coding sequence of the gene (amino acid change or silent): silent. The amino acid at this position in the patent sequence is “R.” The dbSNP accession number for this SNP is gnl|dbSNP|ss115400_allelePos=51.

[0901] A single nucleotide polymorphism in TLK1, SEQ ID NO: 37, SEQ ID NO: 103, occurs at nucleotide position 2358. The polymorphism results in the following SNP: R (A/G). The nucleotide in the patent sequence is “A.” The SNP occurs within the following region (UTR or amino acid number): 707. The SNP has the following effect on the coding sequence of the gene (amino acid change or silent): silent. The amino acid at this position in the patent sequence is “E.” The dbSNP accession number for this SNP is gnl|dbSNP|ss1515395_allelePos=51.

[0902] A single nucleotide polymorphism in TLK1, SEQ ID NO: 37, SEQ ID NO: 103, occurs at nucleotide position 2294. The polymorphism results in the following SNP: W (A/T). The nucleotide in the patent sequence is “T.” The SNP occurs within the following region (UTR or amino acid number): 686. The SNP has the following effect on the coding sequence of the gene (amino acid change or silent): Y/F. The amino acid at this position in the patent sequence is “F.” The dbSNP accession number for this SNP is gnl|dbSNP|ss1515394_allelePos=51.

[0903] A single nucleotide polymorphism in TLK1, SEQ ID NO: 37, SEQ ID NO: 103, occurs at nucleotide position 2229. The polymorphism results in the following SNP: R (A/G). The nucleotide in the patent sequence is “A.” The SNP occurs within the following region (UTR or amino acid number): 664. The SNP has the following effect on the coding sequence of the gene (amino acid change or silent): silent. The amino acid at this position in the patent sequence is “V.” The dbSNP accession number for this SNP is gnl|dbSNP|ss1515393_allelePos=51.

[0904] A single nucleotide polymorphism in TLK1, SEQ ID NO: 37, SEQ ID NO: 103, occurs at nucleotide position 2014. The polymorphism results in the following SNP: Y (C/T). The nucleotide in the patent sequence is “C.” The SNP occurs within the following region (UTR or amino acid number): 593. The SNP has the following effect on the coding sequence of the gene (amino acid change or silent): silent. The amino acid at this position in the patent sequence is “L.” The dbSNP accession number for this SNP is gnl|dbSNP|ss1515384_allelePos=51.

[0905] A single nucleotide polymorphism in TLK1, SEQ ID NO: 37, SEQ ID NO: 103, occurs at nucleotide position 1137. The polymorphism results in the following SNP: W (A/T). The nucleotide in the patent sequence is “T.” The SNP occurs within the following region (UTR or amino acid number): 300. The SNP has the following effect on the coding sequence of the gene (amino acid change or silent): silent. The amino acid at this position in the patent sequence is “I.” The dbSNP accession number for this SNP is gnl|dbSNP|ss115380_allelePos=51.

[0906] A single nucleotide polymorphism in TLK1, SEQ ID NO: 37, SEQ ID NO: 103, occurs at nucleotide position 3279. The polymorphism results in the following SNP: R (A/G). The nucleotide in the patent sequence is “A.” The SNP occurs within the following region (UTR or amino acid number): 3′ UTR. The dbSNP accession number for this SNP is gnl|dbSNP|ss1515413_allelePos=51.

[0907] A single nucleotide polymorphism in TLK1, SEQ ID NO: 37, SEQ ID NO: 103, occurs at nucleotide position 3142. The polymorphism results in the following SNP: S(C/G). The nucleotide in the patent sequence is “G.” The SNP occurs within the following region (UTR or amino acid number): 3′ UTR. The dbSNP accession number for this SNP is gnl|dbSNP|ss1515412_allelePos=51.

[0908] A single nucleotide polymorphism in TLK1, SEQ ID NO: 37, SEQ ID NO: 103, occurs at nucleotide position 2488. The polymorphism results in the following SNP: W (A/T). The nucleotide in the patent sequence is “A.” The SNP occurs within the following region (UTR or amino acid number): 751. The SNP has the following effect on the coding sequence of the gene (amino acid change or silent): N/Y. The amino acid at this position in the patent sequence is “N.” The dbSNP accession number for this SNP is gnl|dbSNP|ss1515398_allelePos=51.

[0909] A single nucleotide polymorphism in TLK1, SEQ ID NO: 37, SEQ ID NO: 103, occurs at nucleotide position 1711. The polymorphism results in the following SNP: K (G/T). The nucleotide in the patent sequence is “T.” The SNP occurs within the following region (UTR or amino acid number): 492. The SNP has the following effect on the coding sequence of the gene (amino acid change or silent): D/Y. The amino acid at this position in the patent sequence is “Y.” The dbSNP accession number for this SNP is gnl|dbSNP|ss115382_allelePos=51.

[0910] A single nucleotide polymorphism in TLK1, SEQ ID NO: 37, SEQ ID NO: 103, occurs at nucleotide position 1730. The polymorphism results in the following SNP: M (A/C). The nucleotide in the patent sequence is “A.” The SNP occurs within the following region (UTR or amino acid number): 498. The SNP has the following effect on the coding sequence of the gene (amino acid change or silent): S/Y. The amino acid at this position in the patent sequence is “Y.” The dbSNP accession number for this SNP is gnl|dbSNP|ss1515383_allelePos=51.

[0911] A single nucleotide polymorphism in TLK1, SEQ ID NO: 37, SEQ ID NO: 103, occurs at nucleotide position 1083. The polymorphism results in the following SNP: M (A/C). The nucleotide in the patent sequence is “A.” The SNP occurs within the following region (UTR or amino acid number): 282. The SNP has the following effect on the coding sequence of the gene (amino acid change or silent): E/D. The amino acid at this position in the patent sequence is “E.” The dbSNP accession number for this SNP is gnl|dbSNP|ss115377_allelePos=51.

[0912] A single nucleotide polymorphism in TLK1, SEQ ID NO: 37, SEQ ID NO: 103, occurs at nucleotide position 1647. The polymorphism results in the following SNP: Y (C/T). The nucleotide in the patent sequence is “C.” The SNP occurs within the following region (UTR or amino acid number): 470. The SNP has the following effect on the coding sequence of the gene (amino acid change or silent): silent. The amino acid at this position in the patent sequence is “H.” The dbSNP accession number for this SNP is gnl|dbSNP|ss1515381_allelePos=51.

[0913] A single nucleotide polymorphism in TLK1, SEQ ID NO: 37, SEQ ID NO: 103, occurs at nucleotide position 1092. The polymorphism results in the following SNP: R (A/G). The nucleotide in the patent sequence is “A.” The SNP occurs within the following region (UTR or amino acid number): 285. The SNP has the following effect on the coding sequence of the gene (amino acid change or silent): silent. The amino acid at this position in the patent sequence is “K.” The dbSNP accession number for this SNP is gnl|dbSNP|ss15379_allelePos=51.

[0914] A single nucleotide polymorphism in TLK1, SEQ ID NO: 37, SEQ ID NO: 103, occurs at nucleotide position 1035. The polymorphism results in the following SNP: Y (C/T). The nucleotide in the patent sequence is “T.” The SNP occurs within the following region (UTR or amino acid number): 266. The SNP has the following effect on the coding sequence of the gene (amino acid change or silent): silent. The amino acid at this position in the patent sequence is “A.” The dbSNP accession number for this SNP is gnl|dbSNP|ss1515376_allelePos=51.

[0915] A single nucleotide polymorphism in TLK1, SEQ ID NO: 37, SEQ ID NO: 103, occurs at nucleotide position 951. The polymorphism results in the following SNP: R (A/G). The nucleotide in the patent sequence is “A.” The SNP occurs within the following region (UTR or amino acid number): 238. The SNP has the following effect on the coding sequence of the gene (amino acid change or silent): silent. The amino acid at this position in the patent sequence is “T.” The dbSNP accession number for this SNP is gnl|dbSNP|ss1515375_allelePos=51.

[0916] A single nucleotide polymorphism in Wnk2, SEQ ID NO: 42, SEQ ID NO: 108, occurs at nucleotide position 7079. The polymorphism results in the following SNP: K (G/T). The nucleotide in the patent sequence is “T.” The SNP occurs within the following region (UTR or amino acid number): 3′ UTR. The dbSNP accession number for this SNP is gnl|dbSNP|ss2899_allelePos=78.

[0917] A single nucleotide polymorphism in MAP3K1, SEQ ID NO: 43, SEQ ID NO: 109, occurs at nucleotide position 2716. The polymorphism results in the following SNP: R (A/G). The nucleotide in the patent sequence is “A.” The SNP occurs within the following region (UTR or amino acid number): 906. The SNP has the following effect on the coding sequence of the gene (amino acid change or silent): I/V. The amino acid at this position in the patent sequence is “I.” The dbSNP accession number for this SNP is gnl|dbSNP|ss1317910_allelePos=285.

[0918] A single nucleotide polymorphism in MAP3K1, SEQ ID NO: 43, SEQ ID NO: 109, occurs at nucleotide position 6227. The polymorphism results in the following SNP: W (A/T). The nucleotide in the patent sequence is “A.” The SNP occurs within the following region (UTR or amino acid number): 3′ UTR. The dbSNP accession number for this SNP is gnl|dbSNP ss1146242_allelePos=109.

[0919] A single nucleotide polymorphism in MAP3K1, SEQ ID NO: 43, SEQ ID NO: 109, occurs at nucleotide position 5560. The polymorphism results in the following SNP: R (A/G). The nucleotide in the patent sequence is “A.” The SNP occurs within the following region (UTR or amino acid number): 3′ UTR. The dbSNP accession number for this SNP is gnl|dbSNP|ss1286358_allelePos=101.

[0920] A single nucleotide polymorphism in MAP3K1, SEQ ID NO: 43, SEQ ID NO: 109, occurs at nucleotide position 3187. The polymorphism results in the following SNP: M (A/C). The nucleotide in the patent sequence is “C.” The SNP occurs within the following region (UTR or amino acid number): 1063. The SNP has the following effect on the coding sequence of the gene (amino acid change or silent): silent. The amino acid at this position in the patent sequence is “R.” The dbSNP accession number for this SNP is gnl|dbSNP|ss1146312_allelePos=101.

[0921] A single nucleotide polymorphism in MAP3K1, SEQ ID NO: 43, SEQ ID NO: 109, occurs at nucleotide position 6015. The polymorphism results in the following SNP: R (A/G). The nucleotide in the patent sequence is “G.” The SNP occurs within the following region (UTR or amino acid number): 3′ UTR. The dbSNP accession number for this SNP is gnl|dbSNP|ss1146243_allelePos=101.

[0922] A single nucleotide polymorphism in MAP3K1, SEQ ID NO: 43, SEQ ID NO: 109, occurs at nucleotide position 2416. The polymorphism results in the following SNP: R (A/G). The nucleotide in the patent sequence is “A.” The SNP occurs within the following region (UTR or amino acid number): 806. The SNP has the following effect on the coding sequence of the gene (amino acid change or silent): N/D. The amino acid at this position in the patent sequence is “N.” The dbSNP accession number for this SNP is gnl|dbSNP|ss1146310_allelePos=101.

[0923] A single nucleotide polymorphism in MAP3K1, SEQ ID NO: 43, SEQ ID NO: 109, occurs at nucleotide position 1284. The polymorphism results in the following SNP: R (A/G). The nucleotide in the patent sequence is “A.” The SNP occurs within the following region (UTR or amino acid number): 428. The SNP has the following effect on the coding sequence of the gene (amino acid change or silent): silent. The amino acid at this position in the patent sequence is “T.” The dbSNP accession number for this SNP is gnl|dbSNP|ss1146300_allelePos=101.

[0924] A single nucleotide polymorphism in MAP3K8, SEQ ID NO: 44, SEQ ID NO: 110, occurs at nucleotide position 247. The polymorphism results in the following SNP: S(C/G). The nucleotide in the patent sequence is “G.” The SNP occurs within the following region (UTR or amino acid number): 83. The SNP has the following effect on the coding sequence of the gene (amino acid change or silent): Q/E. The amino acid at this position in the patent sequence is “E.” The dbSNP accession number for this SNP is gnl|dbSNP|ss1394913_allelePos=101.

[0925] A single nucleotide polymorphism in MAP3K8, SEQ ID NO: 44, SEQ ID NO: 110, occurs at nucleotide position 2485. The polymorphism results in the following SNP: K (G/T). The nucleotide in the patent sequence is “T.” The SNP occurs within the following region (UTR or amino acid number): 3′ UTR. The dbSNP accession number for this SNP is gnl|dbSNP|ss1617_allelePos=49.

[0926] A single nucleotide polymorphism in MAP3K8, SEQ ID NO: 44, SEQ ID NO: 110, occurs at nucleotide position 2298. The polymorphism results in the following SNP: M (A/C). The nucleotide in the patent sequence is “A.” The SNP occurs within the following region (UTR or amino acid number): 3′ UTR. The dbSNP accession number for this SNP is gnl|dbSNP|ss1547718_allelePos=51.

[0927] A single nucleotide polymorphism in STLK6r, SEQ ID NO: 46 SEQ ID NO: 112, occurs at nucleotide position 487. The polymorphism results in the following SNP: R (A/G). The nucleotide in the patent sequence is “G.” The SNP occurs within the following region (UTR or amino acid number): 82. The SNP has the following effect on the coding sequence of the gene (amino acid change or silent): silent. The amino acid at this position in the patent sequence is “T.” The dbSNP accession number for this SNP is gnl|dbSNP|ss1483412_allelePos=100.

[0928] A single nucleotide polymorphism in Map2K2, SEQ ID NO: 47 SEQ ID NO: 113, occurs at nucleotide position 904. The polymorphism results in the following SNP: M (A/C). The nucleotide in the patent sequence is “C.” The SNP occurs within the following region (UTR or amino acid number): 219. The SNP has the following effect on the coding sequence of the gene (amino acid change or silent): silent. The amino acid at this position in the patent sequence is “I.” The dbSNP accession number for this SNP is gnl|dbSNP|ss1937135_allelePos=201.

[0929] A single nucleotide polymorphism in CCK4, SEQ ID NO: 48 SEQ ID NO: 114, occurs at nucleotide position 3636. The polymorphism results in the following SNP: Y (C/T). The nucleotide in the patent sequence is “T.” The SNP occurs within the following region (UTR or amino acid number): 3′ UTR. The dbSNP accession number for this SNP is gnl|dbSNP|ss1527472_allelePos=51.

[0930] A single nucleotide polymorphism in RYK, SEQ ID NO: 50 SEQ ID NO: 116, occurs at nucleotide position 2875. The polymorphism results in the following SNP: R (A/G). The nucleotide in the patent sequence is “G.” The SNP occurs within the following region (UTR or amino acid number): 3′ UTR. The dbSNP accession number for this SNP is gnl|dbSNP|ss16914_allelePos=101.

[0931] A single nucleotide polymorphism in RYK, SEQ ID NO: 50 SEQ ID NO: 116, occurs at nucleotide position 2496. The polymorphism results in the following SNP: W (A/T). The nucleotide in the patent sequence is “A.” The SNP occurs within the following region (UTR or amino acid number): 3′ UTR. The dbSNP accession number for this SNP is gnl|dbSNP|ss1525573_allelePos=51.

[0932] A single nucleotide polymorphism in RYK, SEQ ID NO: 50 SEQ ID NO: 116, occurs at nucleotide position 851. The polymorphism results in the following SNP: R (A/G). The nucleotide in the patent sequence is “G.” The SN occurs within the following region (UTR or amino acid number): 254. The SN has the following effect on the coding sequence of the gene (amino acid change or silent): N/S. The amino acid at this position in the patent sequence is “S.” The dbSNP accession number for this SNP is gnl|dbSNP|ss1525514_allelePos=51.

[0933] A single nucleotide polymorphism in RYK, SEQ ID NO: 50 SEQ ID NO: 116, occurs at nucleotide position 386. The polymorphism results in the following SNP: R (A/G). The nucleotide in the patent sequence is “G.” The SNP occurs within the following region (UTR or amino acid number): 99. The SNP has the following effect on the coding sequence of the gene (amino acid change or silent): N/S. The amino acid at this position in the patent sequence is “S.” The dbSNP accession number for this SNP is gnl|dbSNP|ss1525513_allelePos=51.

[0934] A single nucleotide polymorphism in RYK, SEQ ID NO: 50 SEQ ID NO: 116, occurs at nucleotide position 2764. The polymorphism results in the following SNP: Y (C/T). The nucleotide in the patent sequence is “T.” The SNP occurs within the following region (UTR or amino acid number): 3′ UTR. The dbSNP accession number for this SNP is gnl|dbSNP|ss16913_allelePos=31.

[0935] A single nucleotide polymorphism in LRRK2, SEQ ID NO: 51 SEQ ID NO: 117, occurs at nucleotide position 5425. The polymorphism results in the following SNP: W (A/T). The nucleotide in the patent sequence is. “T.” The SNP occurs within the following region (UTR or amino acid number): 1598. The SNP has the following effect on the coding sequence of the gene (amino acid change or silent): EN. The amino acid at this position in the patent sequence is “V.” The dbSNP accession number for this SNP is gnl|dbSNP|ss63276_allelePos=97.

[0936] A single nucleotide polymorphism in pMLK4, SEQ ID NO: 52 SEQ ID NO: 118, occurs at nucleotide position 3597. The polymorphism results in the following SNP: R (A/G). The nucleotide in the patent sequence is “A.” The SNP occurs within the following region (UTR or amino acid number): 3′ UTR. The dbSNP accession number for this SNP is gnl|dbSNP|ss2057123_allelePos=323.

[0937] A single nucleotide polymorphism in pMLK4, SEQ ID NO: 52 SEQ ID NO: 118, occurs at nucleotide position 3914. The polymorphism results in the following SNP: Y (C/T). The nucleotide in the patent sequence is “T.” The SNP occurs within the following region (UTR or amino acid number): 3′ UTR. The dbSNP accession number for this SNP is gnl|dbSNP|ss2057120_allelePos=201.

[0938] A single nucleotide polymorphism in pMLK4, SEQ ID NO: 52 SEQ ID NO: 118, occurs at nucleotide position 3668. The polymorphism results in the following SNP: Y (C/T). The nucleotide in the patent sequence is “C.” The SNP occurs within the following region (UTR or amino acid number): 3′ UTR. The dbSNP accession number for this SNP is gnl|dbSNP|ss2057122_allelePos=288.

[0939] A single nucleotide polymorphism in pMLK4, SEQ ID NO: 52 SEQ ID NO: 118, occurs at nucleotide position 3800. The polymorphism results in the following SNP: Y (C/T). The nucleotide in the patent sequence is “C.” The SNP occurs within the following region (UTR or amino acid number): 3′ UTR. The dbSNP accession number for this SNP is gnl|dbSNP|ss2057121_allelePos=22.

[0940] A single nucleotide polymorphism in pMLK4, SEQ ID NO: 52 SEQ ID NO: 118, occurs at nucleotide position 2580. The polymorphism results in the following SNP: Y (C/T). The nucleotide in the patent sequence is “C.” The SNP occurs within the following region (UTR or amino acid number): 773. The SNP has the following effect on the coding sequence of the gene (amino acid change or silent): silent. The amino acid at this position in the patent sequence is “S.” The dbSNP accession number for this SNP is gnl|dbSNP|ss1411720_allelePos=519.

[0941] A single nucleotide polymorphism in pMLK4, SEQ ID NO: 52 SEQ ID NO: 118, occurs at nucleotide position 2611. The polymorphism results in the following SNP: K (G/T). The nucleotide in the patent sequence is “T.” The SNP occurs within the following region (UTR or amino acid number): 784. The SNP has the following effect on the coding sequence of the gene (amino acid change or silent): G/C. The amino acid at this position in the patent sequence is “C.” The dbSNP accession number for this SNP is gnl|dbSNP|ss141719_allelePos=488.

[0942] A single nucleotide polymorphism in pMLK4, SEQ ID NO: 52 SEQ ID NO: 118, occurs at nucleotide position 4193. The polymorphism results in the following SNP: R (A/G). The nucleotide in the patent sequence is “A.” The SNP occurs within the following region (UTR or amino acid number): 3′ UTR. The dbSNP accession number for this SNP is gnl|dbSNP|ss2057119_allelePos=201.

[0943] A single nucleotide polymorphism in pMLK4, SEQ ID NO: 52 SEQ ID NO: 118, occurs at nucleotide position 4309. The polymorphism results in the following SNP: Y (C/T). The nucleotide in the patent sequence is “C.” The SNP occurs within the following region (UTR or amino acid number): 3′ UTR. The dbSNP accession number for this SNP is gnl|dbSNP|ss2057118_allelePos=201.

[0944] A single nucleotide polymorphism in KSR, SEQ ID NO: 53 SEQ ID NO: 119, occurs at nucleotide position 4096. The polymorphism results in the following SNP: S(C/G). The nucleotide in the patent sequence is “C.” The SNP occurs within the following region (UTR or amino acid number): 3′ UTR. The dbSNP accession number for this SNP is gnl|dbSNP|ss100899_allelePos=172.

[0945] A single nucleotide polymorphism in KSR2, SEQ ID NO: 54 SEQ ID NO: 120, occurs at nucleotide position 612. The polymorphism results in the following SNP: S(C/G). The nucleotide in the patent sequence is “C.” The SNP occurs within the following region (UTR or amino acid number): 204. The SNP has the following effect on the coding sequence of the gene (amino acid change or silent): silent. The amino acid at this position in the patent sequence is “T.” The dbSNP accession number for this SNP is gnl|dbSNP|ss2005786_allelePos=201.

[0946] A single nucleotide polymorphism in KIAA1646, SEQ ID NO: 55 SEQ ID NO: 121, occurs at nucleotide position 3769. The polymorphism results in the following SNP: M (A/C). The nucleotide in the patent sequence is “A.” The SNP occurs within the following region (UTR or amino acid number): 3′ UTR. The dbSNP accession number for this SNP is gnl|dbSNP|ss2052346_allelePos=499.

[0947] A single nucleotide polymorphism in KIAA1646, SEQ ID NO: 55 SEQ ID NO: 121, occurs at nucleotide position 3020. The polymorphism results in the following SNP: Y (C/T). The nucleotide in the patent sequence is “T.” The SNP occurs within the following region (UTR or amino acid number): 3′ UTR. The dbSNP accession number for this SNP is gnl|dbSNP|ss2052345_allelePos=201.

[0948] A single nucleotide polymorphism in KIAA1646, SEQ ID NO: 55 SEQ ID NO: 121, occurs at nucleotide position 2577. The polymorphism results in the following SNP: K (G/T). The nucleotide in the patent sequence is “T.” The SNP occurs within the following region (UTR or amino acid number): 3′ UTR. The dbSNP accession number for this SNP is gnl|dbSNP|ss2052344_allelePos=201.

[0949] A single nucleotide polymorphism in KIAA1646, SEQ ID NO: 55 SEQ ID NO: 121, occurs at nucleotide position 2391. The polymorphism results in the following SNP: R (A/G). The nucleotide in the patent sequence is “A.” The SNP occurs within the following region (UTR or amino acid number): 3′ UTR. The dbSNP accession number for this SNP is gnl|dbSNP|ss2052344_allelePos=201.

[0950] A single nucleotide polymorphism in KLAA1646, SEQ ID NO: 55 SEQ ID NO: 121, occurs at nucleotide position 4272. The polymorphism results in the following SNP: R (A/G). The nucleotide in the patent sequence is “A.” The SNP occurs within the following region (UTR or amino acid number): 3′ UTR. The dbSNP accession number for this SNP is gnl|dbSNP|ss2052347_allelePos=201.

[0951] A single nucleotide polymorphism in IP6K1, SEQ ID NO: 57 SEQ ID NO: 123, occurs at nucleotide position 3669. The polymorphism results in the following SNP: Y (C/T). The nucleotide in the patent sequence is “C.” The SNP occurs within the following region (UTR or amino acid number): 3′ UTR. The dbSNP accession number for this SNP is gnl|dbSNP|ss1522850_allelePos=51.

[0952] A single nucleotide polymorphism in IP6K1, SEQ ID NO: 57 SEQ ID NO: 123, occurs at nucleotide position 2851. The polymorphism results in the following SNP: R (A/G). The nucleotide in the patent sequence is “G.” The SNP occurs within the following region (UTR or amino acid number): 3′ UTR. The dbSNP accession number for this SNP is gnl|dbSNP|ss1522846_allelePos=51.

[0953] A single nucleotide polymorphism in YAB1, SEQ ID NO: 58 SEQ ID NO: 124, occurs at nucleotide position 2506. The polymorphism results in the following SNP: R (A/G). The nucleotide in the patent sequence is “G.” The SNP occurs within the following region (UTR or amino acid number): 3′ UTR. The dbSNP accession number for this SNP is gnl|dbSNP|ss1305707_allelePos=99.

[0954] A single nucleotide polymorphism in YAB1, SEQ ID NO: 58 SEQ ID NO: 124, occurs at nucleotide position 1538. The polymorphism results in the following SNP: Y (C/T). The nucleotide in the patent sequence is “C.” The SNP occurs within the following region (UTR or amino acid number): 480. The SNP has the following effect on the coding sequence of the gene (amino acid change or silent): silent. The amino acid at this position in the patent sequence is “F.” The dbSNP accession number for this SNP is gnl|dbSNP|ss1529336-allelePos=51.

[0955] A single nucleotide polymorphism in SGK493, SEQ ID NO: 61 SEQ ID NO: 127, occurs at nucleotide position 1094. The polymorphism results in the following SNP: R (A/G). The nucleotide in the patent sequence is “A.” The SNP occurs within the following region (UTR or amino acid number): 349. The SNP has the following effect on the coding sequence of the gene (amino acid change or silent): R/G. The amino acid at this position in the patent sequence is “R.” The dbSNP accession number for this SNP is gnl|dbSNP|ss1826551_allelePos=201.

[0956] A single nucleotide polymorphism in SGK493, SEQ ID NO: 61 SEQ ID NO: 127, occurs at nucleotide position 1690. The polymorphism results in the following SNP: Y (C/T). The nucleotide in the patent sequence is “T.” The SNP occurs within the following region (UTR or amino acid number): 547. The SNP has the following effect on the coding sequence of the gene (amino acid change or silent): silent. The amino acid at this position in the patent sequence is “A.” The dbSNP accession number for this SNP is gnl|dbSNP|ss1826528_allelePos=201.

[0957] A single nucleotide polymorphism in BRD2, SEQ ID NO: 62 SEQ ID NO: 128, occurs at nucleotide position 920. The polymorphism results in the following SNP: K (G/T). The nucleotide in the patent sequence is “T.” The SNP occurs within the following region (UTR or amino acid number): 5′ UTR. The dbSNP accession number for this SNP is gnl|dbSNP|ss1425392 allelePos=324.

[0958] A single nucleotide polymorphism in BRD2, SEQ ID NO: 62 SEQ ID NO: 128, occurs at nucleotide position 1794. The polymorphism results in the following SNP: R (A/G). The nucleotide in the patent sequence is “A.” The SNP occurs within the following region (UTR or amino acid number): 31. The SNP has the following effect on the coding sequence of the gene (amino acid change or silent): silent. The amino acid at this position in the patent sequence is “K.” The dbSNP accession number for this SNP is gnl|dbSNP|ss686785_allelePos=201.

[0959] A single nucleotide polymorphism in BRD2, SEQ ID NO: 62 SEQ ID NO: 128, occurs at nucleotide position 3510. The polymorphism results in the following SNP: Y (C/T). The nucleotide in the patent sequence is “T.” The SNP occurs within the following region (UTR or amino acid number): 603. The SNP has the following effect on the coding sequence of the gene (amino acid change or silent): silent. The amino acid at this position in the patent sequence is “S.” The dbSNP accession number for this SNP is gnl|dbSNP|rs516535_allelePos=201.

[0960] A single nucleotide polymorphism in BRD2, SEQ ID NO: 62 SEQ ID NO: 128, occurs at nucleotide position 2413. The polymorphism results in the following SNP: Y (C/T). The nucleotide in the patent sequence is “C.” The SNP occurs within the following region (UTR or amino acid number): 238. The SNP has the following effect on the coding sequence of the gene (amino acid change or silent): L/F. The amino acid at this position in the patent sequence is “L.” The dbSNP accession number for this SNP is gnl|dbSNP|ss1973307_allelePos=201.

[0961] A single nucleotide polymorphism in BRD2, SEQ ID NO: 62 SEQ ID NO: 128, occurs at nucleotide position 3199. The polymorphism results in the following SNP: K (G/T). The nucleotide in the patent sequence is “G.” The SNP occurs within the following region (UTR or amino acid number): 500. The SNP has the following effect on the coding sequence of the gene (amino acid change or silent): E/stop. The amino acid at this position in the patent sequence is “E.” The dbSNP accession number for this SNP is gnl|dbSNP|ss15121_allelePos=101.

[0962] A single nucleotide polymorphism in BRD2, SEQ ID NO: 62 SEQ ID NO: 128, occurs at nucleotide position 3333. The polymorphism results in the following SNP: R (A/G). The nucleotide in the patent sequence is “G.” The SNP occurs within the following region (UTR or amino acid number): 544. The SNP has the following effect on the coding sequence of the gene (amino acid change or silent): silent. The amino acid at this position in the patent sequence is “K.” The dbSNP accession number for this SNP is gnl|dbSNP|ss13218_allelePos=101.

[0963] A single nucleotide polymorphism in BRD2, SEQ ID NO: 62 SEQ ID NO: 128, occurs at nucleotide position 4348. The polymorphism results in the following SNP: M (A/C). The nucleotide in the patent sequence is “C.” The SNP occurs within the following region (UTR or amino acid number): 3′ UTR.—The dbSNP accession number for this SNP is gnl|dbSNP|ss12998_allelePos=101.

[0964] A single nucleotide polymorphism in BRD2, SEQ ID NO: 62 SEQ ID NO: 128, occurs at nucleotide position 3411. The polymorphism results in the following. SNP: Y (C/T). The nucleotide in the patent sequence is “T.” The SNP occurs within the following region (UTR or amino acid number): 570. The SNP has the following effect on the coding sequence of the gene (amino acid change or silent): silent. The amino acid at this position in the patent sequence is “D.” The dbSNP accession number for this SNP is gnl|dbSNP|ss1550506_allelePos=51.

[0965] A single nucleotide polymorphism in BRD2, SEQ ID NO: 62 SEQ ID NO: 128, occurs at nucleotide position 1344. The polymorphism results in the following SNP: R (A/G). The nucleotide in the patent sequence is “G.” The SNP occurs within the following region (UTR or amino acid number): 5′ UTR. The dbSNP accession number for this SNP is gnl|dbSNP|ss1550446_allelePos=51.

[0966] A single nucleotide polymorphism in BRD2, SEQ ID NO: 62 SEQ ID NO: 128, occurs at nucleotide position 4416. The polymorphism results in the following SNP: Y (C/T). The nucleotide in the patent sequence is “T.” The SNP occurs within the following region (UTR or amino acid number): 3′ UTR. The dbSNP accession number for this SNP is gnl|dbSNP|ss1550446_allelePos=51.

[0967] A single nucleotide polymorphism in BRD2, SEQ ID NO: 62 SEQ ID NO: 128, occurs at nucleotide position 4219. The polymorphism results in the following SNP: Y (C/T). The nucleotide in the patent sequence is “C.” The SNP occurs within the following region (UTR or amino acid number): 3′ UTR. The dbSNP accession number for this SNP is gnl|dbSNP|ss1523158_allelePos=51.

[0968] A single nucleotide polymorphism in BRD2, SEQ ID NO: 62 SEQ ID NO: 128, occurs at nucleotide position 3342. The polymorphism results in the following SNP: R (A/G). The nucleotide in the patent sequence is “G.” The SNP occurs within the following region (UTR or amino acid number): 547. The SNP has the following effect on the coding sequence of the gene (amino acid change or silent): silent. The amino acid at this position in the patent sequence is “R.” The dbSNP accession number for this SNP is gnl|dbSNP|ss1523069_allelePos=51.

[0969] A single nucleotide polymorphism in BRD2, SEQ ID NO: 62 SEQ ID NO: 128, occurs at nucleotide position 811. The polymorphism results in the following SNP: Y (C/T). The nucleotide in the patent sequence is “C.” The SNP occurs within the following region (UTR or amino acid number): 5′ UTR. The dbSNP accession number for this SNP is gnl|dbSNP|ss1522874_allelePos=51.

[0970] A single nucleotide polymorphism in BRD2, SEQ ID NO: 62 SEQ ID NO: 128, occurs at nucleotide position 2379. The polymorphism results in the following SNP: S(C/G). The nucleotide in the patent sequence is “G.” The SNP occurs within the following region (UTR or amino acid number): 226. The SNP has the following effect on the coding sequence of the gene (amino acid change or silent): silent. The amino acid at this position in the patent sequence is “L.” The dbSNP accession number for this SNP is gnl|dbSNP|ss18333_allelePos=31.

[0971] A single nucleotide polymorphism in BRD3, SEQ ID NO: 63, SEQ ID NO: 129, occurs at nucleotide position 2405. The polymorphism results in the following SNP: Y (C/T). The nucleotide in the patent sequence is “T.” The SNP occurs within the following region (UTR or amino acid number): 3′ UTR. The dbSNP accession number for this SNP is gnl|dbSNP|ss575919_allelePos=201.

[0972] A single nucleotide polymorphism in BRD3, SEQ ID NO: 63, SEQ ID NO: 129, occurs at nucleotide position 1075. The polymorphism results in the following SNP: R (A/G). The nucleotide in the patent sequence is “G.” The SNP occurs within the following region (UTR or amino acid number): 312. The SNP has the following effect on the coding sequence of the gene (amino acid change or silent): silent. The amino acid at this position in the patent sequence is “L.” The dbSNP accession number for this SNP is gnl|dbSNP|ss630265_allelePos=201.

[0973] A single nucleotide polymorphism in BRD3, SEQ ID NO: 63, SEQ ID NO: 129, occurs at nucleotide position 1975. The polymorphism results in the following SNP: Y (C/T). The nucleotide in the patent sequence is “C.” The SNP occurs within the following region (UTR or amino acid number): 612. The SNP has the following effect on the coding sequence of the gene (amino acid change or silent): silent. The amino acid at this position in the patent sequence is “D.” The dbSNP accession number for this SNP is gnl|dbSNP|ss601346_allelePos=201.

[0974] A single nucleotide polymorphism in BRD3, SEQ ID NO: 63, SEQ ID NO: 129, occurs at nucleotide position 1423. The polymorphism results in the following SNP: Y (C/T). The nucleotide in the patent sequence is “C.” The SNP occurs within the following region (UTR or amino acid number): 428. The SNP has the following effect on the coding sequence of the gene (amino acid change or silent): silent. The amino acid at this position in the patent sequence is “P.” The dbSNP accession number for this SNP is gnl|dbSNP|ss634964_allelePos=201.

[0975] A single nucleotide polymorphism in BRD3, SEQ ID NO: 63, SEQ ID NO: 129, occurs at nucleotide position 2934. The polymorphism results in the following SNP: Y (C/T). The nucleotide in the patent sequence is “C.” The SNP occurs within the following region (UTR or amino acid number): 3′ UTR. The dbSNP accession number for this SNP is gnl|dbSNP|ss17101_allelePos=101.

[0976] A single nucleotide polymorphism in BRD3, SEQ ID NO: 63, SEQ ID NO: 129, occurs at nucleotide position 2796. The polymorphism results in the following SNP: Y (C/T). The nucleotide in the patent sequence is “C.” The SNP occurs within the following region (UTR or amino acid number): 3′ UTR. The dbSNP accession number for this SNP is gnl|dbSNP|ss1527035-allelePos=51.

[0977] A single nucleotide polymorphism in BRD4, SEQ ID NO: 64, SEQ ID NO: 130, occurs at nucleotide position 1846. The polymorphism results in the following SNP: R (A/G). The nucleotide in the patent sequence is “G.” The SNP occurs within the following region (UTR or amino acid number): 542. The SNP has the following effect on the coding sequence of the gene (amino acid change or silent): N/D. The amino acid at this position in the patent sequence is “D.” The dbSNP accession number for this SNP is gnl|dbSNP|ss1512910_allelePos=51.

[0978] A single nucleotide polymorphism in BRDT, SEQ ID NO: 65, SEQ ID NO: 131, occurs at nucleotide position 821. The polymorphism results in the following SNP: M (A/C). The nucleotide in the patent sequence is “A.” The SNP occurs within the following region (UTR or amino acid number): 238. The SNP has the following effect on the coding sequence of the gene (amino acid change or silent): K/N. The amino acid at this position in the patent sequence is “K.” The dbSNP accession number for this SNP is gnl|dbSNP|ss1559581_allelePos=482.

[0979] A single nucleotide polymorphism in BRDT, SEQ ID NO: 65, SEQ ID NO: 131, occurs at nucleotide position 2976. The polymorphism results in the following SNP: M (A/C). The nucleotide in the patent sequence is “C.” The SNP occurs within the following region (UTR or amino acid number): 3′ UTR. The dbSNP accession number for this SNP is gnl|dbSNP|ss1553268_allelePos=51.

[0980] A single nucleotide polymorphism in BRDT, SEQ ID NO: 65, SEQ ID NO: 131, occurs at nucleotide position 2785. The polymorphism results in the following SNP: M (A/C). The nucleotide in the patent sequence is “C.” The SNP occurs within the following region (UTR or amino acid number): 893. The SNP has the following effect on the coding sequence of the gene (amino acid change or silent): Q/P. The amino acid at this position in the patent sequence is “P.” The dbSNP accession number for this SNP is gnl|dbSNP|ss1553264 allelePos=51.

[0981] A single nucleotide polymorphism in BRDT, SEQ ID NO: 65, SEQ ID NO: 131, occurs at nucleotide position 1114. The polymorphism results in the following SNP: M (A/C). The nucleotide in the patent sequence is “C.” The SNP occurs within the following region (UTR or amino acid number): 336. The SNP has the following effect on the coding sequence of the gene (amino acid change or silent): stop/S. The amino acid at this position in the patent sequence is “S.” The dbSNP accession number for this SNP is gnl|dbSNP|ss1553262_allelePos=51.

[0982] A single nucleotide polymorphism in BRDT, SEQ ID NO: 65, SEQ ID NO: 131, occurs at nucleotide position 1113. The polymorphism results in the following SNP: W (A/T). The nucleotide in the patent sequence is “T.” The SNP occurs within the following region (UTR or amino acid number): 336. The SNP has the following effect on the coding sequence of the gene (amino acid change or silent): Y/S. The amino acid at this position in the patent sequence is “S.” The dbSNP accession number for this SNP is gnl|dbSNP|ss1553261_allelePos=51.

[0983] A single nucleotide polymorphism in BRDT, SEQ ID NO: 65, SEQ ID NO: 131, occurs at nucleotide position 2882. The polymorphism results in the following SNP: M (A/C). The nucleotide in the patent sequence is “C.” The SNP occurs within the following region (UTR or amino acid number): 925. The SNP has the following effect on the coding sequence of the gene (amino acid change or silent): silent. The amino acid at this position in the patent sequence is “A.” The dbSNP accession number for this SNP is gnl|dbSNP|ss1553267_allelePos=51.

[0984] A single nucleotide polymorphism in BRDT, SEQ ID NO: 65, SEQ ID NO: 131, occurs at nucleotide position 2851. The polymorphism results in the following SNP: M (A/C). The nucleotide in the patent sequence is “C.” The SNP occurs within the following region (UTR or amino acid number): 915. The SNP has the following effect on the coding sequence of the gene (amino acid change or silent): Q/P. The amino acid at this position in the patent sequence is “P.” The dbSNP accession number for this SNP is gnl|dbSNP|ss1553266_allelePos=51.

[0985] A single nucleotide polymorphism in BRDT, SEQ ID NO: 65, SEQ ID NO: 131, occurs at nucleotide position 2846. The polymorphism results in the following SNP: M (A/C). The nucleotide in the patent sequence is “C.” The SNP occurs within the following region (UTR or amino acid number): 913. The SNP has the following effect on the coding sequence of the gene (amino acid change or silent): silent. The amino acid at this position in the patent sequence is “A.” The dbSNP accession number for this SNP is gnl|dbSNP|ss1553265_allelePos=51.

### Example 9

### Demonstration of Gene Amplification by Southern Blotting

[0986] Materials and Methods

[0987] Nylon membranes are purchased from Boehringer Mannheim. Denaturing solution contains 0.4 M NaOH and 0.6 M NaCl. Neutralization solution contains 0.5 M Tris-HCL, pH 7.5 and 1.5 M NaCl. Hybridization solution contains 50% formamide, 6×SSPE, 2.5× Denhardt's solution, 0.2 mg/mL denatured salmon DNA, 0.1 mg/mL yeast tRNA, and 0.2% sodium dodecyl sulfate. Restriction enzymes are purchased from Boehringer Mannheim. Radiolabeled probes are prepared using the Prime-it II kit by Stratagene. The beta actin DNA fragment used for a probe template is purchased from Clontech.

[0988] Genomic DNA is isolated from a variety of tumor cell lines (such as MCF-7, MDA-MB-231, Calu-6, A549, HCT-15, HT-29, Colo 205, LS-180, DLD-1, HCT-116, PC3, CAPAN-2, MIA-PaCa-2, PANC-1, AsPc-1, BxPC-3, OVCAR-3, SKOV3, SW 626 and PA-1, and from two normal cell lines.

[0989] A 10 μg aliquot of each genomic DNA sample is digested with EcoR I restriction enzyme and a separate 10 μg sample is digested with Hind III restriction enzyme. The restriction-digested DNA samples are loaded onto a 0.7% agarose gel and, following electrophoretic separation, the DNA is capillary-transferred to a nylon membrane by standard methods (Sambrook, J. et al. (1989) Molecular Cloning: A Laboratory Manual, Cold Spring Harbor Laboratory).

### Example 10

### Detection of Protein-Protein Interaction Through Phage Display

[0990] Materials And Methods

[0991] Phage display provides a method for isolating molecular interactions based on affinity for a desired bait cDNA fragments cloned as fusions to phage coat proteins are displayed on the surface of the phage. Phage(s) interacting with a bait are enriched by affinity purification and the insert DNA from individual clones is analyzed.

[0992] T7 Phage Display Libraries

[0993] All libraries were constructed in the T7Select1-1b vector (Novagen) according to the manufacturer's directions.

[0994] Bait Presentation

[0995] Protein domains to be used as baits are generated as C-terminal fusions to GST and expressed in E. coli. Peptides are chemically synthesized and biotinylated at the N-terminus using a long chain spacer biotin reagent.

[0996] Selection

[0997] Aliquots of refreshed libraries (10¹⁰-10¹² pfu) supplemented with PanMix and a cocktail of E. coli inhibitors (Sigma P-8465) are incubated for 1-2 hrs at room temperature with the immobilized baits. Unbound phage is extensively washed (at least 4 times) with wash buffer.

[0998] After 3-4 rounds of selection, bound phage is eluted in 100 μL of 1% SDS and plated on agarose plates to obtain single plaques.

[0999] Identification of Insert DNAs

[1000] Individual plaques are picked into 25 μL of 10 mM EDTA and the phage is disrupted by heating at 70° C. for 10 min. 2 μL of the disrupted phage are added to 50 μL PCR reaction mix. The insert DNA is amplified by 35 rounds of thermal cycling (94° C., 50 sec; 50° C., 1 min; 72° C., 1 min).

[1001] Composition of Buffer

[1002] 10× PanMix

[1003] 5% Triton X-100

[1004] 10% non-fat dry milk (Carnation)

[1005] 10 mM EGTA

[1006] 250 mM NaF

[1007] 250 μg/mL Heparin (sigma)

[1008] 250 μg/mL sheared, boiled salmon sperm DNA (sigma)

[1009] 0.05% Na azide

[1010] Prepared in PBS

[1011] Wash Buffer

PBS supplemented with:
0.5% NP-40
25 μl g/mL heparin
PCR reaction mix

| | |
|---|---|
| 1.0 mL | 10x PCR buffer (Perkin-Elmer, with 15 mM Mg) |
| 0.2 mL | each dNTPs (10 mM stock) |
| 0.1 mL | T7UP primer (15 pmol/μL) GGAGCTGTCGTATTCCAGTC |
| 0.1 mL | T7DN primer (15 pmol/μL) |
| | AACCCCTCAAGACCCGTTTAG |
| 0.2 mL | 25 mM MgCl₂ or MgSO₄ to compensate for EDTA |

Q.S. to 10 mL with distilled water
Add 1 unit of Taq polymerase per 50 μL reaction
LIBRARY: T7 Select1-H441

### Example 26

### HUV-EC-C Assay

[1012] The following protocol may also be used to measure a compound's activity against PDGF-R, FGF-R, VEGF, aFGF or Flk-1/KDR, all of which are naturally expressed by HUV-EC cells.

[1013] Day 0

[1014] 1. Wash and trypsinize HUV-EC-C cells (human umbilical vein endothelial cells, (American Type Culture Collection; catalogue no. 1730 CRL). Wash with Dulbecco's phosphate-buffered saline (D-PBS; obtained from Gibco BRL; catalogue no. 14190-029) 2 times at about 1 ml/10 cm² of tissue culture flask. Trypsinize with 0.05% trypsin-EDTA in non-enzymatic cell dissociation solution (Sigma Chemical Company; catalogue no. C-1544). The 0.05% trypsin was made by diluting 0.25% trypsin/1 mM EDTA (Gibco; catalogue no. 25200-049) in the cell dissociation solution. Trypsinize with about 1 ml/25-30 cm² of tissue culture flask for about 5 minutes at 37° C. After cells have detached from the flask, add an equal volume of assay medium and transfer to a 50 ml sterile centrifuge tube (Fisher Scientific; catalogue no. 05-539-6).

[1015] 2. Wash the cells with about 35 ml assay medium in the 50 ml sterile centrifuge tube by adding the assay medium, centrifuge for 10 minutes at approximately 200 g, aspirate the supernatant, and resuspend with 35 ml D-PBS. Repeat the wash two more times with D-PBS, resuspend the cells in about 1 ml assay medium/15 cm² of tissue culture flask. Assay medium consists of F12K medium (Gibco BRL; catalogue no. 21127-014)+0.5% heat-inactivated fetal bovine serum. Count the cells with a Coulter Counter Coulter Electronics, Inc.) and add assay medium to the cells to obtain a concentration of 0.8-1.0×105 cells/ml.

[1016] 3. Add cells to 96-well flat-bottom plates at 100 μl/well or 0.8-1.0×10⁴ cells/well; incubate ˜24 h at 37° C., 5% CO2.

[1017] Day 1

[1018] 1. Make up two-fold drug titrations in separate 96-well plates, generally 50 μM on down to 0 μM. Use the same assay medium as mentioned in day 0, step 2, above. Titrations are made by adding 90 μl/well of drug at 200 μM (4× the final well concentration) to the top well of a particular plate column. Since the stock drug concentration is usually 20 mM in DMSO, the 200 μM drug concentration contains 2% DMSO.

[1019] Therefore, diluent made up to 2% DMSO in assay medium (F12K+0.5% fetal bovine serum) is used as diluent for the drug titrations in order to dilute the drug but keep the DMSO concentration constant. Add this diluent to the remaining wells in the column at 60 μl/well. Take 60 μl from the 120 μl of 200 μM drug dilution in the top well of the column and mix with the 60 μl in the second well of the column. Take 60 μl from this well and mix with the 60 μl in the third well of the column, and so on until two-fold titrations are completed. When the next-to-the-last well is mixed, take 60 μl of the 120 μl in this well and discard it. Leave the last well with 60 μl of DMSO/media diluent as a non-drug-containing control. Make 9 columns of titrated drug, enough for triplicate wells each for 1) VEGF (obtained from Pepro Tech Inc., catalogue no. 100-200, 2) endothelial cell growth factor (ECGF) (also known as acidic fibroblast growth factor, or aFGF) (obtained from Boehringer Mannheim Biochemica, catalogue no. 1439 600); or, 3) human PDGF B/B (1276-956, Boehringer Mannheim, Germany) and assay media control. ECGF comes as a preparation with sodium heparin.

[1020] 2. Transfer 50 μl/well of the drug dilutions to the 96-well assay plates containing the 0.8-1.0×10⁴ cells/100 μl/well of the HUV-EC-C cells from day 0 and incubate ˜2 h at 37° C., 5% CO₂.

[1021] 3. In triplicate, add 50 μl/well of 80 μg/ml VEGF, 20 ng/ml ECGF, or media control to each drug condition. As with the drugs, the growth factor concentrations are 4× the desired final concentration. Use the assay media from day 0, step 2, to make the concentrations of growth factors. Incubate approximately 24 hours at 37° C., 5% CO₂. Each well will have 50 μl drug dilution, 50 μl growth factor or media, and 100 μl cells, =200 μl/well total. Thus the 4× concentrations of drugs and growth factors become 1× once everything has been added to the wells.

[1022] Day 2

[1023] 1. Add ³H-thymidine (Amersham; catalogue no. TRK-686) at 1 μCi/well (10 L1/well of 100 μCi/ml solution made up in RPMI media+10% heat-inactivated fetal bovine serum) and incubate ˜24 h at 37° C., 5% CO₂. Note: ³H-thymidine is made up in RPMI media because all of the other applications for which we use the ³H-thymidine involve experiments done in RPMI. The media difference at this step is probably not significant. RPMI was obtained from Gibco BRL, catalogue no. 11875-051.

[1024] Day 3

[1025] 1. Freeze Plates Overnight at −20° C.

[1026] Day 4

[1027] 1. Thaw plates and harvest with a 96-well plate harvester (Tomtec Harvester 96®) onto filter mats (Wallac; catalogue no. 1205-401); read counts on a Wallac Betaplate™ liquid scintillation counter.

### CONCLUSION

[1028] One skilled in the art would readily appreciate that the present invention is well adapted to carry out the objects and obtain the ends and advantages mentioned, as well as those inherent therein. The molecular complexes and the methods, procedures, treatments, molecules, specific compounds described herein are presently representative of preferred embodiments, are exemplary, and are not intended as limitations on the scope of the invention. It will be readily apparent to one skilled in the art that varying substitutions and modifications may be made to the invention disclosed herein without departing from the scope and spirit of the invention.

[1029] All patents and publications mentioned in the specification are indicative of the levels of those skilled in the art to which the invention pertains. All patents and publications are herein incorporated by reference to the same extent as if each individual publication was specifically and individually indicated to be incorporated by reference.

[1030] The invention illustratively described herein suitably may be practiced in the absence of any element or elements, limitation or limitations that are not specifically disclosed herein. Thus, for example, in each instance herein any of the terms “comprising,” “consisting essentially of” and “consisting of” may be replaced with either of the other two terms. The terms and expressions which have been employed are used as terms of description and not of limitation, and there is no intention that in the use of such terms and expressions of excluding any equivalents of the features shown and described or portions thereof, but it is recognized that various modifications are possible within the scope of the invention claimed. Thus, it should be understood that although the present invention has been specifically disclosed by preferred embodiments and optional features, modification and variation of the concepts herein disclosed may be resorted to by those skilled in the art, and that such modifications and variations are considered to be within the scope of this invention as defined by the appended claims.

[1031] In addition, where features or aspects of the invention are described in terms of Markush groups, those skilled in the art will recognize that the invention is also thereby described in terms of any individual member or subgroup of members of the Markush group. For example, if X is described as selected from the group consisting of bromine, chlorine, and iodine, claims for X being bromine and claims for X being bromine and chlorine are fully described.

[1032] In view of the degeneracy of the genetic code, other combinations of nucleic acids also encode the claimed peptides and proteins of the invention. For example, all four nucleic acid sequences GCT, GCC, GCA, and GCG encode the amino acid alanine. Therefore, if for an amino acid there exists an average of three codons, a polypeptide of 100 amino acids in length will, on average, be encoded by 3100, or 5×1047, nucleic acid sequences. Thus, a nucleic acid sequence can be modified to form a second nucleic acid sequence, encoding the same polypeptide as encoded by the first nucleic acid sequences, using routine procedures and without undue experimentation. Thus, all possible nucleic acids that encode the claimed peptides and proteins are also fully described herein, as if all were written out in full taking into account the codon usage, especially that preferred in humans. Furthermore, changes in the amino acid sequences of polypeptides, or in the corresponding nucleic acid sequence encoding such polypeptide, may be designed or selected to take place in an area of the sequence where the significant activity of the polypeptide remains unchanged. For example, an amino acid change may take place within a β-turn, away from the active site of the polypeptide. Also changes such as deletions (e.g. removal of a segment of the polypeptide, or in the corresponding nucleic acid sequence encoding such polypeptide, which does not affect the active site) and additions (e.g. addition of more amino acids to the polypeptide sequence without affecting the function of the active site, such as the formation of GST-fusion proteins, or additions in the corresponding nucleic acid sequence encoding such polypeptide without affecting the function of the active site) are also within the scope of the present invention. Such changes to the polypeptides can be performed by those with ordinary skill in the art using routine procedures and without undue experimentation. Thus, all possible nucleic and/or amino acid sequences that can readily be determined not to affect a significant activity of the peptide or protein of the invention are also fully described herein.

[1033] The invention has been described broadly and generically herein. Each of the narrower species and subgeneric groupings falling within the generic disclosure also form part of the invention. This includes the generic description of the invention with a proviso or negative limitation removing any subject matter from the genus, regardless of whether or not the excised material is specifically recited herein.

TABLE 1
Description of Open Reading Frames

| | | | | | | | | | ORF | ORF | ORF | Physical |
|---|---|---|---|---|---|---|---|---|---|---|---|---|
| Gene_NAME | Sp | ID#na | ID#aa | Super-family | Group | Family | NA_length | AA_length | Start | End | Length | Status |
| CRIK | H | 1 | 67 | Protein Kinase | AGC | DMPK | 8656 | 2055 | 51 | 6218 | 6168 | FL |
| DMPK2 | H | 2 | 68 | Protein Kinase | AGC | DMPK | 5438 | 1572 | 66 | 4784 | 4719 | Partial |
| MAST3 | H | 3 | 69 | Protein Kinase | AGC | MAST | 5990 | 1332 | 38 | 4031 | 3996 | Partial |
| MAST205 | H | 4 | 70 | Protein Kinase | AGC | MAST | 5516 | 1798 | 1 | 5397 | 5397 | Partial |
| MASTL | H | 5 | 71 | Protein Kinase | AGC | MAST | 3882 | 878 | 967 | 3603 | 2637 | FL |
| PKC_eta | H | 6 | 72 | Protein Kinase | AGC | PKC | 2392 | 683 | 407 | 2458 | 2052 | FL |
| H19102 | H | 7 | 73 | Protein Kinase | AGC | RSK | 1564 | 449 | 188 | 1537 | 1350 | Partial |
| MSK1 | H | 8 | 74 | Protein Kinase | AGC | RSK | 3813 | 802 | 159 | 2567 | 2409 | FL |
| YANK3 | H | 9 | 75 | Protein Kinase | AGC | YANK | 2051 | 486 | 70 | 1530 | 1461 | FL |
| MARK2 | H | 10 | 76 | Protein Kinase | CAMK | CAMKL | 3063 | 787 | 399 | 2762 | 2364 | Partial |
| NuaK2 | H | 11 | 77 | Protein Kinase | CAMK | CAMKL | 3463 | 672 | 57 | 2075 | 2019 | FL |
| BRSK2 | H | 12 | 78 | Protein Kinase | CAMK | CAMKL | 3831 | 674 | 25 | 2049 | 2025 | Partial |
| MARK4 | H | 13 | 79 | Protein Kinase | CAMK | CAMKL | 3249 | 752 | 17 | 2275 | 2259 | Partial |
| DCAMKL2 | H | 14 | 80 | Protein Kinase | CAMK | DCAMKL | 2827 | 766 | 350 | 2650 | 2301 | FL |
| PIM2 | H | 15 | 81 | Protein Kinase | CAMK | PIM | 2186 | 435 | 1 | 1305 | 1305 | Partial |
| PIM3 | H | 16 | 82 | Protein Kinase | CAMK | PIM | 2405 | 326 | 436 | 1416 | 981 | FL |
| TSSK4 | H | 17 | 83 | Protein Kinase | CAMK | TSSK | 1710 | 328 | 617 | 1603 | 987 | FL |
| CKIL2 | H | 18 | 84 | Protein Kinase | CKI | CKIL | 5946 | 1244 | 368 | 4102 | 3735 | FL |
| PCTAIRE3 | H | 19 | 85 | Protein Kinase | CMGC | CDK | 3229 | 505 | 303 | 1817 | 1515 | FL |
| PFTAIRE2 | H | 20 | 86 | Protein Kinase | CMGC | CDK | 2250 | 435 | 45 | 1352 | 1308 | FL |
| ERK7 | H | 21 | 87 | Protein Kinase | CMGC | MAPK | 1906 | 563 | 19 | 1710 | 1692 | FL |
| CKIIa rs | H | 22 | 88 | Protein Kinase | Other | CKII | 1494 | 391 | 150 | 1325 | 1176 | Partial |
| DYRK4 | H | 23 | 89 | Protein Kinase | CMGC | DYRK | 2886 | 921 | 1 | 2766 | 2766 | FL |
| HIPK1 | H | 24 | 90 | Protein Kinase | CMGC | DYRK | 8212 | 1210 | 286 | 3918 | 3633 | FL |
| HIPK4 | H | 25 | 91 | Protein Kinase | CMGC | DYRK | 3142 | 616 | 977 | 2827 | 1851 | FL |
| BIKE | H | 26 | 92 | Protein Kinase | Other | NAK | 3895 | 1161 | 203 | 3688 | 3486 | FL |
| NEK10 | H | 27 | 93 | Protein Kinase | Other | NEK | 3912 | 1125 | 176 | 3553 | 3378 | FL |
| pNEK5 | H | 28 | 94 | Protein Kinase | Other | NEK | 2816 | 889 | 147 | 2816 | 2670 | FL |
| NEK1 | H | 29 | 95 | Protein Kinase | Other | NEK | 5583 | 1286 | 493 | 4353 | 3861 | Partial |
| NEK3 | H | 30 | 96 | Protein Kinase | Other | NEK | 2326 | 506 | 296 | 1816 | 1521 | Partial |
| SGK069 | H | 31 | 97 | Protein Kinase | Other | NKF1 | 1156 | 348 | 110 | 1156 | 1047 | FL |
| SGK110 | H | 32 | 98 | Protein Kinase | Other | NKF1 | 1853 | 414 | 299 | 1543 | 1245 | FL |
| NRBP2 | H | 33 | 99 | Protein Kinase | Other | NRBP | 3765 | 507 | 282 | 1805 | 1524 | FL |
| CNK | H | 34 | 100 | Protein Kinase | Other | PLK | 2535 | 646 | 534 | 2474 | 1941 | Partial |
| SCYL2 | H | 35 | 101 | Protein Kinase | Other | SCY1 | 5525 | 933 | 173 | 2974 | 2802 | Partial |
| SRPK2 | H | 36 | 102 | Protein Kinase | CMGC | SRPK | 3715 | 688 | 179 | 2245 | 2067 | FL |
| TLK1 | H | 37 | 103 | Protein Kinase | Other | TLK | 4321 | 787 | 238 | 2601 | 2364 | Partial |
| SGK07I | H | 38 | 104 | Protein Kinase | Other | Unique | 2285 | 632 | 195 | 2093 | 1899 | FL |
| SK516 | H | 39 | 105 | Protein Kinase | Other | Unique | 7364 | 929 | 180 | 2969 | 2790 | Partial |
| H85389 | H | 40 | 106 | Protein Kinase | Other | ULK | 1971 | 401 | 134 | 1339 | 1206 | FL |
| Wee1b | H | 41 | 107 | Protein Kinase | Other | WEE | 1704 | 567 | 1 | 1704 | 1704 | Partial |
| Wnk2 | H | 42 | 108 | Protein Kinase | Other | Wnk | 7981 | 2245 | 67 | 6804 | 6738 | Partial |
| MAP3K1 | H | 43 | 109 | Protein Kinase | STE | STE11 | 7026 | 1511 | 1 | 4536 | 4536 | Partial |
| MAP3K8 | H | 44 | 110 | Protein Kinase | STE | STE11 | 2571 | 735 | 1 | 2208 | 2208 | Partial |
| Pak4_m | H | 45 | 111 | Protein Kinase | STE | STE20 | 1782 | 593 | 1 | 1782 | 1782 | Partial |
| STLK6 rs | H | 46 | 112 | Protein Kinase | STE | STE20 | 2171 | 418 | 242 | 1498 | 1257 | Partial |
| MAP2K2 | H | 47 | 113 | Protein Kinase | STE | STE7 | 1724 | 380 | 248 | 1390 | 1143 | FL |
| CCK4 | H | 48 | 114 | Protein Kinase | TK | CCK4 | 4232 | 1070 | 191 | 3403 | 3213 | FL |
| LMR1 | H | 49 | 115 | Protain Kinase | TK | Lmr | 5313 | 1374 | 85 | 4209 | 4125 | FL |
| RYK | H | 50 | 116 | Protein Kinase | TK | Ryk | 3663 | 607 | 91 | 1914 | 1824 | Partial |
| LRRK2 | H | 51 | 117 | Protein Kinase | TKL | LRRK | 9753 | 2534 | 633 | 8237 | 7605 | Partial |
| pMtK4 | H | 52 | 118 | Protein Kinase | TKL | MLK | 4667 | 1036 | 262 | 3372 | 3111 | FL |
| KSR | H | 53 | 119 | Protein Kinase | TKL | RAF | 5913 | 901 | 165 | 2870 | 2706 | Partial |
| KSR2 | H | 54 | 120 | Protein Kinase | TKL | RAF | 2994 | 982 | 1 | 2949 | 2949 | FL |
| KIAA1646 | H | 55 | 121 | Lipid Kinase | DAG kin | DAG kin | 4429 | 537 | 92 | 1705 | 1614 | Partial |
| DGK beta | H | 56 | 122 | Lipid Kinase | DAG kin | DAG kin | 4297 | 804 | 372 | 2786 | 2415 | FL |
| IP6K1 | H | 57 | 123 | Lipid Kinase | Inositol kinase | IP6K | 4461 | 441 | 309 | 1634 | 1326 | Partial |
| YAB1 | H | 58 | 124 | Atypical PK | Atypical | ABC1 | 2508 | 647 | 99 | 2042 | 1944 | FL |
| AF052122 | H | 59 | 125 | Atypical PK | Atypical | ABC1 | 5237 | 591 | 1 | 1776 | 1776 | FL |
| AAF23325 | H | 60 | 126 | Atypical PK | Atypical | ABC1 | 1368 | 455 | 1 | 1368 | 1368 | FL |
| SGK493 | H | 61 | 127 | Atypical PK | Atypical | RIO1 | 1832 | 552 | 50 | 1708 | 1659 | FL |
| BRD2 | H | 62 | 128 | Atypical PK | BRD | BRD | 4693 | 801 | 1702 | 4107 | 2406 | Partial |
| BRD3 | H | 63 | 129 | Atypical PK | BRD | BRD | 3085 | 726 | 140 | 2320 | 2181 | Partial |
| BRD4 | H | 64 | 130 | Atypical PK | BRD | BRD | 3149 | 722 | 223 | 2391 | 2169 | Partial |
| BRDT | H | 65 | 131 | Atypical PK | BRD | BRD | 3106 | 947 | 108 | 2951 | 2844 | Partial |
| ZC1 | H | 66 | 132 | Protein Kinase | STE | STE20 | 7986 | 1392 | 368 | 4544 | 4179 | FL |

[1034] TABLE 2
A Smith-Waterman Comparison with NCBI Non-redundant Proteins

| Gene: NAME | Sp | ID#no | ID#no | Super-family | Group | Family | AA length | PSCORE | MATCHES |
|---|---|---|---|---|---|---|---|---|---|
| CRIK | H | 1 | 67 | Protein Kinase | AGC | DMPK | 2055 | 0 | 1976 |
| DMPK2 | H | 2 | 68 | Protein Kinase | AGC | DMPK | 1572 | 2.20E−211 | 731 |
| MAST3 | H | 3 | 69 | Protein Kinase | AGC | MAST | 1331 | 0 | 1287 |
| MAST205 | H | 4 | 70 | Protein Kinase | AGC | MAST | 1798 | 0 | 1884 |
| MASTL | H | 5 | 71 | Protein Kinase | AGC | MAST | 878 | 0 | 878 |
| PKC_sta | H | 6 | 72 | Protein Kinase | AGC | PKC | 683 | 0 | 679 |
| M19102 | H | 7 | 73 | Protein Kinase | AGC | RSK | 499 | 1.00E−124 | 269 |
| MSK1 | H | 8 | 74 | Protein Kinase | AGC | RSK | 802 | 3.50E−304 | 787 |
| YANK3 | H | 9 | 75 | Protein Kinase | AGC | YANK | 488 | 8.9e−311 | 444 |
| MARK2 | H | 10 | 76 | Protein Kinase | CAMK | CAMKL | 787 | 2.60E−299 | 752 |
| NuaK2 | H | 11 | 77 | Protein Kinase | CAMK | CAMKL | 672 | 5.10E−289 | 628 |
| BRSK2 | H | 12 | 78 | Protein Kinase | CAMK | CAMKL | 674 | 4.20E−175 | 602 |
| MARK4 | H | 13 | 79 | Protein Kinase | CAMK | CAMKL | 752 | 4.30E−296 | 751 |
| DCAMK12 | H | 14 | 80 | Protein Kinase | CAMK | DCAMKL | 788 | 8.10E−159 | 513 |
| PIM2 | H | 15 | 81 | Protein Kinase | CAMK | PIM | 434 | 1.40E−145 | 334 |
| PIM3 | H | 16 | 82 | Protein Kinase | CAMK | PIM | 326 | 9.90E−174 | 311 |
| TSSK4 | H | 17 | 83 | Protein Kinase | CAMK | TSSK | 328 | 1.60E−89 | 281 |
| CKIL2 | H | 18 | 84 | Protein Kinase | CKI | CKIL | 1244 | 1.50E−298 | 845 |
| PCTAIRES | H | 19 | 85 | Protein Kinase | CMGC | CDK | 504 | 1.50E−220 | 471 |
| PFTAIRE2 | H | 20 | 86 | Protein Kinase | CMGC | CDK | 435 | 5.40E−100 | 225 |
| ERK7 | H | 21 | 87 | Protein Kinase | CMGC | MAPK | 563 | 1.90E−125 | 384 |
| CKItan | H | 22 | 88 | Protein Kinase | Other | CKII | 391 | 9.50E−195 | 390 |
| DYRK4 | H | 23 | 89 | Protein Kinase | CMGC | DYRK | 921 | 1.20E−304 | 526 |
| HIPK1 | H | 24 | 90 | Protein Kinase | CMGC | DYRK | 1210 | 0 | 1181 |
| HIPK4 | H | 25 | 91 | Protein Kinase | CMGC | DYRK | 818 | 0 | 598 |
| BIKE | H | 26 | 92 | Protein Kinase | Other | NAK | 1161 | 7.60E−244 | 960 |
| NEK10 | H | 27 | 93 | Protein Kinase | Other | NEK | 1125 | 9.50E−185 | 428 |
| pNEKS | H | 28 | 94 | Protein Kinase | Other | NEK | 889 | 1.60E−78 | 180 |
| NEK1 | H | 29 | 95 | Protein Kinase | Other | NEK | 1288 | 0 | 1258 |
| NEKS | H | 30 | 96 | Protein Kinase | Other | NEK | 506 | 1.80E−202 | 458 |
| SGK069 | H | 31 | 97 | Protein Kinase | Other | NKF1 | 348 | 7.40E−48 | 122 |
| SGK110 | H | 32 | 98 | Protein Kinase | Other | NKF1 | 414 | 4.00E−35 | 110 |
| NRBP2 | H | 33 | 99 | Protein Kinase | Other | NRBP | 507 | 3.20E−158 | 300 |
| CNK | H | 34 | 100 | Protein Kinase | Other | PLK | 646 | 8.80E−238 | 845 |
| SCYL2 | H | 35 | 101 | Protein Kinase | Other | SCY1 | 853 | 0 | 791 |
| SRPK2 | H | 36 | 102 | Protein Kinase | CMGC | SPRK | 888 | 7.80E−183 | 664 |
| TLK1 | H | 37 | 103 | Protein Kinase | Other | TLK | 787 | 0 | 777 |
| SGKO71 | H | 36 | 104 | Protein Kinase | Other | Unique | 632 | 0.000001 | 83 |
| SK516 | H | 39 | 105 | Protein Kinase | Other | Unique | 929 | 5.70E−180 | 385 |
| H35389 | H | 40 | 106 | Protein Kinase | Other | ULK | 401 | 2.40E−162 | 400 |
| WeeIb | H | 41 | 107 | Protein Kinase | Other | WEE | 567 | 2.00E−287 | 541 |
| Wnk2 | H | 42 | 108 | Protein Kinase | Other | Wnk | 2245 | 0 | 1385 |
| MAR3K1 | H | 43 | 109 | Protein Kinase | STE | STE11 | 1511 | 0 | 1459 |
| MAP3KB | H | 44 | 110 | Protein Kinase | STE | STE11 | 735 | 2.80E−82 | 168 |
| Pak4_m | M | 45 | 111 | Protein Kinase | STE | STE20 | 593 | 2.70E−130 | 550 |
| STLKS | H | 46 | 112 | Protein Kinase | STE | STE20 | 418 | 5.90E−222 | 407 |
| MAP2H2 | H | 47 | 113 | Protein kinase | STE | STE7 | 381 | 4.80E−158 | 353 |
| OCK4 | H | 48 | 114 | Protein Kinase | TK | CCK4 | 1070 | 0 | 4069 |
| LMR1 | H | 49 | 115 | Protein Kinase | TK | Lmr | 1374 | 0 | 1207 |
| RYK | H | 50 | 116 | Protein Kinase | TK | Ryk | 507 | 3.60E-287 | 603 |
| LRRK2 | H | 51 | 117 | Protein Kinase | TKL | LRRK | 2534 | 7.90E−189 | 463 |
| pMLK4 | H | 52 | 118 | Protein Kinase | TKL | MLK | 1036 | 0 | 1027 |
| KSR | H | 53 | 119 | Protein Kinase | TKL | RAF | 901 | 3.30E−269 | 797 |
| KSR2 | H | 54 | 120 | Protein Kinase | TKL | RAF | 982 | 9.80E−119 | 425 |
| KIAA1646 | H | 55 | 121 | Lipid Kinase | DAG kin | DAG kin | 637 | 0 | 481 |
| DGK.bsta | H | 56 | 122 | Lipid Kinase | DAG kin | DAG kin | 804 | 0 | 804 |
| IP6K1 | H | 57 | 123 | Lipid Kinase | Inositol kinase | IP8K | 441 | 1.50E−257 | 441 |
| YAB1 | H | 58 | 124 | Alypical PK | Alypical | ABC1 | 647 | 3.60E−244 | 365 |
| AFO52122 | H | 59 | 125 | Alypical PK | Alypical | ABC1 | 591 | 1.20E−245 | 385 |
| AAF23326 | H | 60 | 125 | Alypical PK | Alypical | ABC1 | 455 | 1.40E−304 | 455 |
| SGK493 | H | 61 | 127 | Alypical PK | Alypical | RIO1 | 552 | 0 | 552 |
| BRD2 | H | 62 | 128 | Alypical PK | BRD | BRD | 501 | 2.50E−256 | 801 |
| BRD3 | H | 63 | 129 | Alypical PK | BRD | BRD | 726 | 2.20E−243 | 726 |
| BRD4 | H | 64 | 130 | Alypical PK | BRD | BRD | 722 | 2.80E−232 | 722 |
| BRDT | H | 65 | 131 | Alypical PK | BRD | BRD | 947 | 0 | 947 |
| ZC1 | H | 66 | 132 | Protein Kinase | STE | STE20 | 1392 | 0 | 1202 |

| Gene: NAME | % Identity | % Similar | ACCESSION | DESCRIPTION |
|---|---|---|---|---|
| CRIK | 96 | 96 | AAC72823 | Rhotac-Interacting cltron kinase [Mus muaculus] |
| DMPK2 | 45 | 83 | NP_448109 | STK related to the myotonic dystrophy PK [Raltus norvegicus] |
| MAST3 | 99 | 99 | BAA25487 | (AB011133) KIAA0581 protein [Homo sapiens] |
| MAST205 | 99 | 99 | NP_055927 | KIAAD807 protein [Homo sapiens] |
| MASTL | 99 | 99 | NP_116233 | Hypothetical protein FLJ14813 [Homo sapiens] |
| PKC_sta | 99 | 99 | NP_006248 | (NM_006258) protein kinase C, eta [Homo sapiens] |
| M19102 | 99 | 99 | BAB71586 | Unnamed protein product [Homo sapiens] |
| MSK1 | 98 | 98 | NP_004748 | Ribosomal protein S8 kinase, polypeplide 5 [Homo sapiens] |
| YANK3 | 91 | 94 | AAH26457 | Hypothetical serinathraonina protein kinase [Mus musculus] |
| MARK2 | 99 | 99 | AAHO8771 | (BC008771) Similar to ELKL molif kinase [Homo sapiens] |
| NuaK2 | 100 | 100 | NP_112214 | (NM_030962) hypothetical protein DKFZp434J037 [Homo sapiens] |
| BRSK2 | 99 | 99 | CAA07196 | Pulative serinethraonine protein kinase [Homo sapiens] |
| MARK4 | 99 | 99 | AAL23683 | MARK4 serinethraonine protein kinase [Homo sapiens] |
| DCAMK12 | 87 | 80 | O15075 | DCAMKL1 (doublecortin-like and CAMK-like 1) [Homo sapiens] |
| PIM2 | 100 | 100 | NP_006888 | Pim-2 oncogene, proto-oncogene Pim-2 [Homo sapiens] |
| PIM3 | 96 | 97 | AAH17621 | Serine thraonine kinase pim3 [Mus musculus] |
| TSSK4 | 85 | 94 | BAB30483 | Putative [Mus musculus] |
| CKIL2 | 100 | 100 | BAA74870 | KIAA0847 protein [Homo sapiens] |
| PCTAIRES | 93 | 83 | 007002 | Serinethraonine protein kinase PCTAIRE-3 [Homo sapiens] |
| PFTAIRE2 | 65 | 81 | NP_035204 | (NM_011074) PFTAIRE protein kinase 1 [Mus musculus] |
| ERK7 | 87 | 75 | AAD127192 | Extracellular signal-regulated kinase 7; ERK7 [Rattus norvegicus] |
| CKItan | 99 | 100 | CAA49758 | Casein kinase 11 alpha subunlt [Homo sapiens] |
| DYRK4 | 99 | 100 | Q9NR20 | DYRK4 4 [Homo sapiens] |
| HIPK1 | 97 | 99 | AAD41592 | Myak-L [Mus musculus] |
| HIPK4 | 97 | 99 | BAB72080 | Hypothetical protein [Macaca fascicularis] |
| BIKE | 82 | 89 | NP_542439 | (NM_080708) Bmp2-Inducible kinase [Mus musculus] |
| NEK10 | 90 | 90 | BAB71395 | (AK067247) unnamed protein product [Homo sapiens] |
| pNEKS | 85 | 82 | P51954 | STK NEK1 (NimA-related protein kinase 1) [Mus musculus] |
| NEK1 | 97 | 97 | BAB67794 | K1AA1901 protein [Homo sapiens] |
| NEKS | 99 | 99 | PS1958 | NEK3 (HSPK 36) [Homo sapiens] |
| SGK069 | 42 | 69 | AAK52420 | Protein kinase Bsk 148 [Danio rorio] |
| SGK110 | 41 | 80 | S71887 | pk9.7 gastrula-specific [Xenopus laevis] |
| NRBP2 | 61 | 75 | NP_037524 | Nuclear receptor binding protein [Homo sapiens] |
| CNK | 99 | 100 | AAH13899 | Unknown (protein for MGC: 14852) [Homo sapiens] |
| SCYL2 | 99 | 99 | BAA92598 | KIAA1360 protein [Homo sapiens] |
| SRPK2 | 99 | 99 | NP_003129 | (NM_003138) SFRS protein kinase 2 [Homo sapiens] |
| TLK1 | 98 | 99 | NP_036422 | (NM_012290) tousled-like kinase 1[Homo sapiens] |
| SGKO71 | 30 | 50 | NP_175853 | Hypothetical protein [Arabidopsis thaliana) |
| SK516 | 100 | 100 | BAA32317 | KIAA0472 protein [Homo sapiens] |
| H35389 | 99 | 99 | CAC10518.2 | Noval protein kinase [Homo sapiens] |
| WeeIb | 99 | 99 | AAD04726 | Similar to wee 1-like protein kinase [Homo sapiens] |
| Wnk2 | 99 | 99 | BAB21851 | KIAA1760 protein [Homo sapuiens] |
| MAR3K1 | 97 | 97 | Q13233 | MEKK 1 [Homo sapiens] |
| MAP3KB | 100 | 100 | XP_017343 | Hypothetical protein fragment FLJ23074 [Homo sapiens] |
| Pak4_m | 82 | 95 | NP_005875 | p21-activated kinase 4, effector for Cdc42Hs [Homo sapiens] |
| STLKS | 97 | 98 | NP_061041.2 | Amyotrophic lateral acterosis 2 candidate 2 [Homo sapiens] |
| MAP2H2 | 92 | 95 | NP_109587 | p45 (MAP kinase kinase 2) [Homo sapiens] |
| OCK4 | 99 | 100 | JC4593 | RTK PTK7 precursor [Homo sapiens] |
| LMR1 | 100 | 100 | NP_{—004911} | Apoplosis-associated lyrosine kinase [Homo sapiens] |
| RYK | 99 | 99 | 137580 | Protein-lyrosine kinase Ryk [Homo sapiens] |
| LRRK2 | 84 | 92 | NP_080006 | RIKEN cDNA 4921513020 gene [mus musculus] |
| pMLK4 | 99 | 99 | CAC84840 | (AJ311798) mixed lineage kinase 4beta [Homo sapiens] |
| KSR | 88 | 92 | NP_038599 | (NM_013571) kinase suppressor of ras [Mus musculus] |
| KSR2 | 48 | 82 | NP_038599 | (NM_013571) kinase suppressor of ras [Mus musculus] |
| KIAA1646 | 100 | 100 | BAB33318 | K1AA1645 protein ]Homo sapiens] |
| DGK.bsta | 100 | 100 | Q9Y6T7 | Diacylgycerol kinase, beta (DGK-BETA) [Homo sapiens] |
| IP6K1 | 100 | 100 | BAA13393.2 | KIAA0263 protein [Homo sapiens] |
| YAB1 | 100 | 100 | NP_064632 | Chaporone, ABC1 activity of bc 1 complex like [Homo sapiens] |
| AFO52122 | 99 | 100 | AAH13114 | Hypothetical protein [Homo sapiens] |
| AAF23326 | 100 | 100 | NP_065154 | Hypothetical protein [Homo sapiens] |
| SGK493 | 100 | 100 | NP_060613 | Hypothetical protein FLJ11159 [Homo sapiens] |
| BRD2 | 100 | 100 | NP_005095 | Bromodomain-containing protein 2 [Homo sapiens] |
| BRD3 | 100 | 100 | NP_031397 | Bromodomain-containing protein 3 [Homo sapiens] |
| BRD4 | 100 | 100 | NP_055114 | Bromodomain-containing protein 4 [Homo sapiens] |
| BRDT | 100 | 100 | NP_001717 | Testis-specific bromodomain protein [Homo sapiens] |
| ZC1 | 86 | 87 | NP_032722 | NCK interacting kinase: HPK/GCK like kinase [MUS musculus] |

B Smith-Waterman Comparison with NCBI Non-redundant Proteins

| Gene NAME | Sp | ID#na | ID#aa | Super-family | Group | Family | QUERYSTART | QUERYEND |
|---|---|---|---|---|---|---|---|---|
| CRIK | H | 1 | 67 | Protein Kinase | AGC | DMPK | 1 | 2055 |
| DMPK2 | H | 2 | 68 | Protein Kinase | AGC | DMPK | 2 | 1482 |
| MAST3 | H | 3 | 69 | Protein Kinase | AGC | MAST | 39 | 1331 |
| MAST205 | H | 4 | 70 | Protein Kinase | AGC | MAST | 1 | 1687 |
| MASTL | H | 5 | 71 | Protein Kinase | AGC | MAST | 1 | 878 |
| PKC eta | H | 6 | 72 | Protein Kinase | AGC | PKC | 1 | 683 |
| H19102 | H | 7 | 73 | Protein Kinase | AGC | RSK | 41 | 310 |
| MSK1 | H | 8 | 74 | Protein Kinase | AGC | RSK | 1 | 800 |
| YANK3 | H | 9 | 75 | Protein Kinase | AGC | YANK | 1 | 485 |
| MARK2 | H | 10 | 76 | Protein Kinase | CAMK | CAMKL | 34 | 787 |
| NuaK2 | H | 11 | 77 | Protein Kinase | CAMK | CAMKL | 45 | 672 |
| BRSK2 | H | 12 | 78 | Protein Kinase | CAMK | CAMKL | 72 | 674 |
| MARK4 | H | 13 | 79 | Protein Kinase | CAMK | CAMKL | 1 | 752 |
| DCAMKL2 | H | 14 | 80 | Protein Kinase | CAMK | DCAMKL | 1 | 741 |
| PIM2 | H | 15 | 81 | Protein Kinase | CAMK | PIM | 101 | 434 |
| PIM3 | H | 16 | 82 | Protein Kinase | CAMK | PIM | 1 | 326 |
| TSSK4 | H | 17 | 83 | Protein Kinase | CAMK | TSSK | 1 | 328 |
| CKIL2 | H | 18 | 84 | Protein Kinase | CKI | CKIL | 600 | 1244 |
| PCTAIRE3 | H | 19 | 85 | Protein Kinase | CMGC | CDK | 1 | 502 |
| PFTAIRE2 | H | 20 | 86 | Protein Kinase | CMGC | CDK | 97 | 426 |
| ERK7 | H | 21 | 87 | Protein Kinase | CMGC | MAPK | 1 | 560 |
| CKllars | H | 22 | 88 | Protein Kinase | Other | CKII | 1 | 391 |
| DYRK4 | H | 23 | 89 | Protein Kinase | CMGC | DYRK | 395 | 921 |
| HIPK1 | H | 24 | 90 | Protein Kinase | CMGC | DYRK | 1 | 1210 |
| HIPK4 | H | 25 | 91 | Protein Kinase | CMGC | DYRK | 1 | 616 |
| BIKE | H | 26 | 92 | Protein Kinase | Other | NAK | 1 | 1161 |
| NEK10 | H | 27 | 93 | Protein Kinase | Other | NEK | 698 | 1125 |
| pNEK5 | H | 28 | 94 | Protein Kinase | Other | NEK | 58 | 333 |
| NEK1 | H | 29 | 95 | Protein Kinase | Other | NEK | 1 | 1286 |
| NEK3 | H | 30 | 96 | Protein Kinase | Other | NEK | 48 | 506 |
| SGK069 | H | 31 | 97 | Protein Kinase | Other | NKF1 | 1 | 348 |
| SGK110 | H | 32 | 98 | Protein Kinase | Other | NKF1 | 96 | 359 |
| NRBP2 | H | 33 | 99 | Protein Kinase | Other | NRBP | 17 | 502 |
| CNK | H | 34 | 100 | Protein Kinase | Other | PLK | 1 | 546 |
| SCYL2 | H | 35 | 101 | Protein Kinase | Other | SCY1 | 140 | 933 |
| SRPK2 | H | 36 | 102 | Protein Kinase | CMGC | SRPK | 1 | 688 |
| TLK1 | H | 37 | 103 | Protein Kinase | Other | TLK | 1 | 787 |
| SGK071 | H | 38 | 104 | Protein Kinase | Other | Unique | 25 | 228 |
| SK516 | H | 39 | 105 | Protein Kinase | Other | Unique | 565 | 929 |
| H85389 | H | 40 | 106 | Protein Kinase | Other | ULK | 1 | 401 |
| WeeIb | H | 41 | 107 | Protein Kinase | Other | WEE | 1 | 559 |
| Wnk2 | H | 42 | 108 | Protein Kinase | Other | Wnk | 860 | 2245 |
| MAP3K1 | H | 43 | 109 | Protein Kinase | STE | STE11 | 21 | 1511 |
| MAP3K8 | H | 44 | 110 | Protein Kinase | STE | STE11 | 547 | 714 |
| Pak4m | M | 45 | 111 | Protein Kinase | STE | STE20 | 1 | 593 |
| STLK6rs | H | 46 | 112 | Protein Kinase | STE | STE20 | 1 | 418 |
| MAP2K2 | H | 47 | 113 | Protein Kinase | STE | STE7 | 2 | 380 |
| CCK4 | H | 48 | 114 | Protein Kinase | TK | CCK4 | 1 | 1070 |
| LMR1 | H | 49 | 115 | Protein Kinase | TK | Lmr | 168 | 1374 |
| RYK | H | 50 | 116 | Protein Kinase | TK | Ryk | 1 | 607 |
| LRRK2 | H | 51 | 117 | Protein Kinase | TKL | LRRK | 1990 | 2534 |
| pMLK4 | H | 52 | 118 | Protein Kinase | TKL | MLK | 1 | 1036 |
| KSR | H | 53 | 119 | Protein Kinase | TKL | RAF | 1 | 901 |
| KSR2 | H | 54 | 120 | Protein Kinase | TKL | RAF | 51 | 982 |
| KIAA1646 | H | 55 | 121 | Lipid Kinase | DAG kin | DAG kin | 57 | 537 |
| DGK beta | H | 56 | 122 | Lipid Kinase | DAG kin | DAG kin | 1 | 804 |
| IP6KI | H | 57 | 123 | Lipid Kinase | Inositol kinase | IP6K | 1 | 441 |
| YAB1 | H | 58 | 124 | Atypical PK | Atypical | ABC1 | 280 | 647 |
| AF052122 | H | 59 | 125 | Atypical PK | Atypical | ABC1 | 206 | 591 |
| AAF23326 | H | 60 | 126 | Atypical PK | Atypical | ABC1 | 1 | 455 |
| SGK493 | H | 61 | 127 | Atypical PK | Atypical | RIO1 | 1 | 552 |
| BRD2 | H | 62 | 128 | Atypical PK | BRD | BRD | 1 | 801 |
| BRD3 | H | 63 | 129 | Atypical PK | BRD | BRD | 1 | 726 |
| BRD4 | H | 64 | 130 | Atypical PK | BRD | BRD | 1 | 722 |
| BRDT | H | 65 | 131 | Atypical PK | BRD | BRD | 1 | 947 |
| ZC1 | H | 66 | 132 | Protein Kinase | STE | STE20 | 1392 | |

| Gene NAME | TARGETSTART | TARGETEND | % QUERY | % TARGET |
|---|---|---|---|---|
| CRIK | 1 | 2055 | 96 | 96 |
| DMPK2 | 4 | 1588 | 48 | 42 |
| MAST3 | 16 | 1308 | 96 | 98 |
| MAST205 | 1 | 1687 | 93 | 97 |
| MASTL | 1 | 878 | 99 | 99 |
| PKC eta | 1 | 682 | 99 | 99 |
| H19102 | 1 | 271 | 59 | 98 |
| MSK1 | 1 | 800 | 98 | 97 |
| YANK3 | 1 | 487 | 91 | 90 |
| MARK2 | 1 | 755 | 95 | 99 |
| NuaK2 | 1 | 628 | 93 | 100 |
| BRSK2 | 1 | 603 | 89 | 99 |
| MARK4 | 1 | 752 | 99 | 99 |
| DCAMKL2 | 1 | 739 | 66 | 69 |
| PIM2 | 1 | 334 | 76 | 100 |
| PIM3 | 1 | 326 | 95 | 95 |
| TSSK4 | 1 | 328 | 85 | 85 |
| CKIL2 | 1 | 645 | 51 | 100 |
| PCTAIRE3 | 1 | 472 | 93 | 99 |
| PFTAIRE2 | 129 | 458 | 51 | 47 |
| ERK7 | 1 | 544 | 68 | 70 |
| CKllars | 1 | 391 | 99 | 99 |
| DYRK4 | 15 | 541 | 57 | 97 |
| HIPK1 | 1 | 1210 | 97 | 97 |
| HIPK4 | 1 | 616 | 97 | 97 |
| BIKE | 1 | 1138 | 82 | 84 |
| NEK10 | 10 | 484 | 38 | 88 |
| pNEK5 | 1 | 275 | 20 | 23 |
| NEK1 | 8 | 1265 | 97 | 99 |
| NEK3 | 1 | 459 | 90 | 99 |
| SGK069 | 394 | 763 | 99 | 41 |
| SGK110 | 9 | 272 | 26 | 30 |
| NRBP2 | 44 | 518 | 59 | 56 |
| CNK | 1 | 646 | 99 | 99 |
| SCYL2 | 3 | 796 | 84 | 99 |
| SRPK2 | 1 | 688 | 99 | 99 |
| TLK1 | 1 | 787 | 98 | 98 |
| SGK071 | 1 | 197 | 9 | 10 |
| SK516 | 1 | 365 | 39 | 100 |
| H85389 | 118 | 517 | 99 | 77 |
| WeeIb | 1 | 541 | 95 | 100 |
| Wnk2 | 1 | 1386 | 61 | 99 |
| MAP3K1 | 2 | 1495 | 96 | 97 |
| MAP3K8 | 1 | 168 | 22 | 100 |
| Pak4m | 1 | 591 | 92 | 93 |
| STLK6rs | 1 | 418 | 97 | 97 |
| MAP2K2 | 1 | 380 | 92 | 88 |
| CCK4 | 1 | 1070 | 99 | 99 |
| LMR1 | 1 | 1207 | 87 | 100 |
| RYK | 1 | 607 | 99 | 99 |
| LRRK2 | 17 | 561 | 18 | 82 |
| pMLK4 | 1 | 1036 | 99 | 99 |
| KSR | 1 | 873 | 88 | 91 |
| KSR2 | 34 | 849 | 46 | 51 |
| KIAA1646 | 1 | 481 | 89 | 100 |
| DGK beta | 1 | 804 | 100 | 100 |
| IP6KI | 22 | 462 | 100 | 95 |
| YAB1 | 1 | 368 | 58 | 100 |
| AF052122 | 1 | 386 | 65 | 99 |
| AAF23326 | 1 | 455 | 100 | 100 |
| SGK493 | 1 | 552 | 100 | 100 |
| BRD2 | 1 | 801 | 100 | 100 |
| BRD3 | 1 | 726 | 100 | 100 |
| BRD4 | 1 | 722 | 100 | 100 |
| BRDT | 1 | 947 | 100 | 100 |
| ZC1 | 1 | 1233 | 87 | 98 |

[1035] TABLE 3
Single Nucleotide Polymorphisms

| | | | | | Nucleotide | | | | |
|---|---|---|---|---|---|---|---|---|---|
| | | | | | in | | Silent/ | AA | |
| | | | Nucleotide | Poly- | patent | AA Residue | Residue | Residue | |
| Gene | ID#na | ID#aa | # | morphism | sequence | # | Change | in Patent | Accession# |
| CRIK | 1 | 67 | 7676 | Y (C/T) | T | 3′ UTR | — | — | gnl\|dbSNP\|ss1631920_allelePos = 201 |
| CRIK | 1 | 67 | 2933 | Y (C/T) | T | 961 | E/A | A | gnl\|dbSNP\|ss1337341_allelePos = 267 |
| CRIK | 1 | 67 | 2924 | R (A/G) | A | 958 | silent | T | gnl\|dbSNP\|ss1337340_allelePos = 258 |
| CRIK | 1 | 67 | 3377 | R (A/G) | A | 1109 | silent | R | gnl\|dbSNP\|ss1631893_allelePos = 310 |
| CRIK | 1 | 67 | 4085 | Y (C/T) | C | 1345 | silent | S | gnl\|dbSNP\|ss1631886_allelePos = 605 |
| DMPK2 | 2 | 68 | 5050 | Y (C/T) | C | 3′ UTR | — | — | gnl\|dbSNP\|ss1752530_allelePos = 201 |
| DMPK2 | 2 | 68 | 1139 | R (A/G) | G | 358 | silent | G | gnl\|dbSNP\|ss1754079_allelePos = 201 |
| MAST3 | 3 | 69 | 2900 | Y (C/T) | C | 955 | silent | D | gnl\|dbSNP\|ss1846926_allelePos = 432 |
| MAST3 | 3 | 69 | 623 | Y (C/T) | C | 196 | silent | H | gnl\|dbSNP\|ss88979_allelePos = 67 |
| MAST205 | 4 | 70 | 2739 | R (A/G) | A | 913 | silent | S | gnl\|dbSNP\|ss1363030_allelePos = 144 |
| MAST205 | 4 | 70 | 25 | Y (C/T) | C | 9 | R/stop | R | gnl\|dbSNP\|ss133576_allelePos = 22 |
| MAST205 | 4 | 70 | 5303 | Y (C/T) | C | 1768 | S/F | S | gnl\|dbSNP\|ss1529170_allelePos = 51 |
| MAST205 | 4 | 70 | 4652 | R (A/G) | A | 1551 | D/G | D | gnl\|dbSNP\|ss1529101_allelePos = 5 |
| MAST205 | 4 | 70 | 3590 | R (A/G) | A | 1197 | K/R | K | gnl\|dbSNP\|ss1529096_allelePos = 51 |
| MAST205 | 4 | 70 | 156 | R (A/G) | G | 52 | silent | A | gnl\|dbSNP\|ss1608593_allelePos = 756 |
| MAST205 | 4 | 70 | 162 | S (C/G) | C | 54 | silent | P | gnl\|dbSNP\|ss497488_allelePos = 201 |
| MASTL | 5 | 71 | 3831 | Y (C/T) | T | 3′ UTR | — | — | gnl\|dbSNP\|ss1383_allelePos = 40 |
| PKC_eta | 6 | 72 | 1840 | Y (C/T) | T | 558 | silent | N | gnl\|dbSNP\|ss1000395_allelePos = 101 |
| PKC_eta | 6 | 72 | 1239 | Y (C/T) | T | 358 | T/I | I | gnl\|dbSNP\|ss1472906_allelePos = 327 |
| PKC_eta | 6 | 72 | 2288 | S (C/G) | C | 3′ UTR | — | — | gnl\|dbSNP\|ss1548761_allelePos = 51 |
| PKC_eta | 6 | 72 | 681 | R (A/G) | A | 172 | H/G | H | gnl\|dbSNP\|ss1509877_allelePos = 51 |
| H19102 | 7 | 73 | None | — | — | — | — | — | — |
| MSK1 | 8 | 74 | 3186 | Y (C/T) | C | 3′ UTR | — | — | gnl\|dbSNP\|ss2025310_allelePos = 201 |
| MSK1 | 8 | 74 | 3658 | R (A/G) | A | 3′ UTR | — | — | gnl\|dbSNP\|ss1530678_allelePos = 5 |
| MSK1 | 8 | 74 | 3769 | R (A/G) | A | 3′ UTR | — | — | gnl\|dbSNP\|ss1530679_allelePos = 51 |
| MSK1 | 8 | 74 | 3432 | K (G/T) | T | 3′ UTR | — | — | gnl\|dbSNP\|ss1530677_allelePos = 51 |
| MSK1 | 8 | 74 | 3779 | K (G/T) | T | 3′ UTR | — | — | gnl\|dbSNP\|ss1530680_allelePos = 51 |
| YANK3 | 9 | 75 | 1852 | Y (C/T) | C | 3′ UTR | — | — | gnl\|dbSNP\|ss18125_allelePos = 101 |
| YANK3 | 9 | 75 | 1895 | R (A/G) | A | 3′ UTR | — | — | gnl\|dbSNP\|ss1517883_allelePos = 5 |
| YANK3 | 9 | 75 | 2021 | M (A/C) | A | 3′ UTR | — | — | gnl\|dbSNP\|ss1517886_allelePos = 51 |
| MARK2 | 10 | 76 | 2570 | Y (C/T) | C | 724 | silent | S | gnl\|dbSNP\|ss1121403_allelePos = 101 |
| MARK2 | 10 | 76 | 2615 | R (A/G) | G | 739 | silent | P | gnl\|dbSNP\|ss1121404_allelePos = 101 |
| MARK2 | 10 | 76 | 1641 | S (C/G) | G | 415 | P/A | A | gnl\|dbSNP\|ss1537647_allelePos = 51 |
| MARK2 | 10 | 76 | 1547 | R (A/G) | A | 383 | silent | L | gnl\|dbSNP\|ss1057176_allelePos = 51 |
| NuaK2 | 11 | 77 | 1670 | S (C/G) | G | 538 | silent | L | gnl\|dbSNP\|ss1295001_allelePos = 93 |
| NuaK2 | 11 | 77 | 1727 | R (A/G) | G | 557 | silent | L | gnl\|dbSNP\|ss1295000_allelePos = 38 |
| BRSK2 | 12 | 78 | None | | | | | | — |
| MARK4 | 13 | 79 | 2916 | R (A/G) | G | 3′ UTR | — | — | gnl\|dbSNP\|ss1967699_allelePos = 201 |
| MARK4 | 13 | 79 | 3032 | Y (C/T) | C | 3′ UTR | — | — | gnl\|dbSNP\|ss1967700_allelePos = 242 |
| MARK4 | 13 | 79 | 1699 | Y (C/T) | C | 561 | silent | R | gnl\|dbSNP\|ss1967693_allelePos = 201 |
| MARK4 | 13 | 79 | 3092 | R (A/G) | G | 3′ UTR | — | — | gnl\|dbSNP\|ss1512875_allelePos = 51 |
| DCAMKL2 | 14 | 80 | None | — | — | — | — | — | — |
| PIM2 | 15 | 81 | 630 | R (A/G) | A | 210 | silent | E | gnl\|dbSNP\|ss1525746_allelePos = 5 |
| PIM2 | 15 | 81 | 1749 | Y (C/T) | T | 3′ UTR | — | — | gnl\|dbSNP\|ss1525747_allelePos = 51 |
| PIM2 | 15 | 81 | 1990 | Y (C/T) | T | 3′ UTR | — | — | gnl\|dbSNP\|ss1525754_allelePos = 51 |
| PIM3 | 16 | 82 | 2057 | Y (C/T) | T | 3′ UTR | — | — | gnl\|dbSNP\|ss1548948_allelePos = 51 |
| PIM3 | 16 | 82 | 1269 | Y (C/T) | C | 278 | silent | P | gnl\|dbSNP\|ss1511148_allelePos = 51 |
| PIM3 | 16 | 82 | 2362 | R (A/G) | G | 3′ UTR | — | — | gnl\|dbSNP\|ss1511264_allelePos = 51 |
| TSSK4 | 17 | 83 | 1203 | R (A/G) | A | 196 | Q/R | Q | gnl\|dbSNP\|ss1975997_allelePos = 201 |
| TSSK4 | 17 | 83 | 152 | M (A/C) | C | 5′ UTR | — | — | gnl\|dbSNP\|ss1588747_allelePos = 749 |
| TSSK4 | 17 | 83 | 141 | R (A/G) | A | 5′ UTR | — | — | gnl\|dbSNP\|ss1588748_allelePos = 738 |
| TSSK4 | 17 | 83 | 238 | R (A/G) | G | 5′ UTR | — | — | gnl\|dbSNP\|ss1211997_allelePos = 524 |
| TSSK4 | 17 | 83 | 84 | Y (C/T) | T | 5′ UTR | — | — | gnl\|dbSNP\|ss934600_allelePos = 307 |
| TSSK4 | 17 | 83 | 281 | R (A/G) | G | 5′ UTR | — | — | gnl\|dbSNP\|ss1747635_allelePos = 2506 |
| TSSK4 | 17 | 83 | 236 | Y (C/T) | C | 5′ UTR | — | — | gnl\|dbSNP\|ss1747634_allelePos = 2461 |
| TSSK4 | 17 | 83 | 136 | Y (C/T) | C | 5′ UTR | — | — | gnl\|dbSNP\|ss2058655_allelePos = 355 |
| TSSK4 | 17 | 83 | 22 | Y (C/T) | C | 5′ UTR | — | — | gnl\|dbSNP\|ss45790_allelePos = 479 |
| TSSK4 | 17 | 83 | 243 | R (A/G) | G | 5′ UTR | — | — | gnl\|dbSNP\|ss2061784_allelePos = 1157 |
| TSSK4 | 17 | 83 | 226 | Y (C/T) | C | 5′ UTR | — | — | gnl\|dbSNP\|ss2061783_allelePos = 1140 |
| TSSK4 | 17 | 83 | 47 | R (A/G) | A | 5′ UTR | — | — | gnl\|dbSNP\|ss1990388_allelePos = 1229 |
| TSSK4 | 17 | 83 | 158 | W (A/T) | A | 5′ UTR | — | — | gnl\|dbSNP\|ss1911350_allelePos = 370 |
| TSSK4 | 17 | 83 | 77 | Y (C/T) | C | 5′ UTR | — | — | gnl\|dbSNP\|ss1909793_allelePos = 506 |
| TSSK4 | 17 | 83 | 137 | R (A/G) | G | 5′ UTR | — | — | gnl\|dbSNP\|ss1908525_allelePos = 1475 |
| TSSK4 | 17 | 83 | 44 | Y (C/T) | T | 5′ UTR | — | — | gnl\|dbSNP\|ss1897673_allelePos = 1677 |
| TSSK4 | 17 | 83 | 11 | R (A/G) | A | 5′ UTR | — | — | gnl\|dbSNP\|ss1857878_allelePos = 1145 |
| TSSK4 | 17 | 83 | 223 | Y (C/T) | C | 5′ UTR | — | — | gnl\|dbSNP\|ss1816570_allelePos = 267 |
| TSSK4 | 17 | 83 | 85 | R (A/G) | G | 5′ UTR | — | — | gnl\|dbSNP\|ss1799649_allelePos = 306 |
| TSSK4 | 17 | 83 | 280 | Y (C/T) | C | 5′ UTR | — | — | gnl\|dbSNP\|ss1732387_allelePos = 496 |
| TSSK4 | 17 | 83 | 97 | Y (C/T) | T | 5′ UTR | — | — | gnl\|dbSNP\|ss1729216_allelePos = 406 |
| TSSK4 | 17 | 83 | 148 | Y (C/T) | C | 5′ UTR | — | — | gnl\|dbSNP\|ss1684407_allelePos = 417 |
| CKIL2 | 18 | 84 | 3889 | S (C/G) | C | 1208 | H/D | H | gnl\|dbSNP\|ss1551913_allelePos = 51 |
| PCTAIRE3 | 19 | 85 | None | — | — | — | — | — | — |
| PCTAIRE2 | 20 | 86 | None | — | — | — | — | — | — |
| ERK7 | 21 | 87 | None | — | — | — | — | — | — |
| CKIIar | 22 | 88 | 1103 | M (A/C) | C | 318 | silent | A | gnl\|dbSNP\|ss1537202_allelePos = 51 |
| CKIIar | 22 | 88 | 1008 | M (A/C) | C | 287 | S/R | R | gnl\|dbSNP\|ss1537192_allelePos = 51 |
| CKIIar | 22 | 88 | 663 | Y (C/T) | C | 172 | R/stop | R | gnl\|dbSNP\|ss1537165_allelePos = 51 |
| CKIIar | 22 | 88 | 1428 | M (A/C) | A | 3′ UTR | — | — | gnl\|dbSNP\|ss1537238_allelePos = 51 |
| CKIIar | 22 | 88 | 194 | Y (C/T) | T | 15 | silent | V | gnl\|dbSNP\|ss5453_allelePos = 51 |
| CKIIar | 22 | 88 | 1200 | R (A/G) | G | 351 | M/V | V | gnl\|dbSNP\|ss1537218_allelePos = 5 |
| CKIIar | 22 | 88 | 1181 | R (A/G) | A | 344 | silent | T | gnl\|dbSNP\|ss1537216_allelePos = 51 |
| CKIIar | 22 | 88 | 1104 | W (A/T) | A | 319 | M/L | M | gnl\|dbSNP\|ss1537203_allelePos = 51 |
| DYRK4 | 23 | 89 | 269 | R (A/G) | G | 90 | R/H | R | gnl\|dbSNP\|ss88136_allelePos = 155 |
| HIPK1 | 24 | 90 | 4114 | Y (C/T) | T | 3′ UTR | — | — | gnl\|dbSNP\|ss12250_allelePos = 101 |
| HIPK4 | 25 | 91 | None | | | | | | — |
| BIKE2 | 26 | 92 | 1606 | R (A/G) | A | 468 | silent | Q | gnl\|dbSNP\|ss1509438_allelePos = 51 |
| NEK10 | 27 | 93 | 1149 | S (C/G) | G | 325 | T/S | S | gnl\|dbSNP\|ss727804_allelePos = 20 |
| NEK10 | 27 | 93 | 1849 | R (A/G) | G | 558 | silent | G | gnl\|dbSNP\|ss1891242_allelePos = 201 |
| NEK10 | 27 | 93 | 2967 | R (A/G) | G | 931 | N/S | S | gnl\|dbSNP\|ss1325417_allelePos = 338 |
| pNEK5 | 28 | 94 | None | — | — | — | — | — | — |
| NEK1 | 29 | 95 | 5063 | R (A/G) | A | 3′ UTR | — | — | gnl\|dbSNP\|ss1520330_allelePos = 51 |
| NEK1 | 29 | 95 | 4848 | Y (C/T) | C | 3′ UTR | — | — | gnl\|dbSNP\|ss1520329_allelePos = 51 |
| NEK3 | 30 | 96 | 1854 | S (C/G) | C | 3′ UTR | — | — | gnl\|dbSNP\|ss3403_allelePos = 2 |
| SGK069 | 31 | 97 | 1001 | S (C/G) | G | 298 | P/A | A | gnl\|dbSNP\|ss1317629_allelePos = 393 |
| SGK069 | 31 | 97 | 323 | Y (C/T) | C | 72 | R/C | R | gnl\|dbSNP\|ss1688815_allelePos = 201 |
| SGK110 | 32 | 98 | 299 | W (A/T) | A | 1 | M/L | M | gnl\|dbSNP\|ss787141_allelePos = 201 |
| SGK110 | 32 | 98 | 985 | R (A/G) | A | 229 | silent | P | gnl\|dbSNP\|ss827468_allelePos = 20 |
| SGK110 | 32 | 98 | 640 | Y (C/T) | C | 114 | silent | L | gnl\|dbSNP\|ss681408_allelePos = 201 |
| NRBP2/SGK034 | 33 | 99 | None | — | — | — | — | — | — |
| CNK | 34 | 100 | None | — | — | — | — | — | — |
| SCYL2/AI05225 | 35 | 101 | None | — | — | — | — | — | — |
| SRPK2 | 36 | 102 | 2219 | Y (C/T) | C | 681 | L/F | L | gnl\|dbSNP\|ss1525084_allelePos = 51 |
| SRPK2 | 36 | 102 | 2047 | Y (C/T) | C | 623 | silent | F | gnl\|dbSNP\|ss1525076_allelePos = 51 |
| SRPK2 | 36 | 102 | 2040 | R (A/G) | G | 621 | Q/R | R | gnl\|dbSNP\|ss1525074_allelePos = 51 |
| SRPK2 | 36 | 102 | 2035 | Y (C/T) | T | 619 | silent | Y | gnl\|dbSNP\|ss1050422_allelePos = 51 |
| SRPK2 | 36 | 102 | 2021 | M (A/C) | C | 615 | I/L | L | gnl\|dbSNP\|ss1525069_allelePos = 51 |
| SRPK2 | 36 | 102 | 2014 | M (A/C) | C | 612 | Q/H | H | gnl\|dbSNP\|ss1525066_allelePos = 51 |
| SRPK2 | 36 | 102 | 2029 | R (A/G) | A | 617 | silent | G | gnl\|dbSNP\|ss1525072_allelePos = 51 |
| SRPK2 | 36 | 102 | 2017 | Y (C/T) | T | 613 | silent | F | gnl\|dbSNP\|ss1525068_allelePos = 51 |
| SRPK2 | 36 | 102 | 2016 | W (A/T) | T | 613 | Y/F | F | gnl\|dbSNP\|ss1525067_allelePos = 51 |
| SRPK2 | 36 | 102 | 2001 | R (A/G) | G | 608 | N/S | S | gnl\|dbSNP\|ss1525064_allelePos = 51 |
| SRPK2 | 36 | 102 | 1999 | S (C/G) | C | 607 | silent | G | gnl\|dbSNP\|ss1525063_allelePos = 51 |
| SRPK2 | 36 | 102 | 1996 | R (A/G) | A | 606 | silent | A | gnl\|dbSNP\|ss1525062_allelePos = 51 |
| SRPK2 | 36 | 102 | 1969 | Y (C/T) | C | 597 | silent | D | gnl\|dbSNP\|ss1525061_allelePos = 51 |
| SRPK2 | 36 | 102 | 2044 | R (A/G) | A | 622 | silent | E | gnl\|dbSNP\|ss1525075_allelePos = 51 |
| SRPK2 | 36 | 102 | 2023 | R (A/G) | A | 615 | silent | L | gnl\|dbSNP\|ss1525072_allelePos = 51 |
| TLK1 | 37 | 103 | 2174 | W (A/T) | A | 646 | V/D | D | gnl\|dbSNP\|ss1515391_allelePos = 51 |
| TLK1 | 37 | 103 | 2489 | R (A/G) | A | 751 | N/S | N | gnl\|dbSNP\|ss1515399_allelePos = 51 |
| TLK1 | 37 | 103 | 2515 | M (A/C) | A | 760 | silent | R | gnl\|dbSNP\|ss1515400_allelePos = 51 |
| TLK1 | 37 | 103 | 2358 | R (A/G) | A | 707 | silent | E | gnl\|dbSNP\|ss1515395_allelePos = 51 |
| TLK1 | 37 | 103 | 2294 | W (A/T) | T | 686 | Y/F | F | gnl\|dbSNP\|ss1515394_allelePos = 51 |
| TLK1 | 37 | 103 | 2229 | R (A/G) | A | 664 | silent | V | gnl\|dbSNP\|ss1515393_allelePos = 51 |
| TLK1 | 37 | 103 | 2014 | Y (C/T) | C | 593 | silent | L | gnl\|dbSNP\|ss1515384_allelePos = 51 |
| TLK1 | 37 | 103 | 1137 | W (A/T) | T | 300 | silent | I | gnl\|dbSNP\|ss1515380_allelePos = 51 |
| TLK1 | 37 | 103 | 3279 | R (A/G) | A | 3′ UTR | — | — | gnl\|dbSNP\|ss1515413_allelePos = 51 |
| TLK1 | 37 | 103 | 3142 | S (C/G) | G | 3′ UTR | — | — | gnl\|dbSNP\|ss1515412_allelePos = 51 |
| TLK1 | 37 | 103 | 2488 | W (A/T) | A | 751 | N/Y | N | gnl\|dbSNP\|ss1515396_allelePos = 51 |
| TLK1 | 37 | 103 | 1711 | K (G/T) | T | 492 | D/Y | Y | gnl\|dbSNP\|ss1515382_allelePos = 51 |
| TLK1 | 37 | 103 | 1730 | M (A/C) | A | 498 | S/Y | Y | gnl\|dbSNP\|ss1515383_allelePos = 51 |
| TLK1 | 37 | 103 | 1083 | M (A/C) | A | 282 | E/D | E | gnl\|dbSNP\|ss1515377_allelePos = 51 |
| TLK1 | 37 | 103 | 1647 | Y (C/T) | C | 470 | silent | H | gnl\|dbSNP\|ss1515381_allelePos = 51 |
| TLK1 | 37 | 103 | 1092 | R (A/G) | A | 285 | silent | K | gnl\|dbSNP\|ss1515379_allelePos = 51 |
| TLK1 | 37 | 103 | 1035 | Y (C/T) | T | 266 | silent | A | gnl\|dbSNP\|ss1515376_allelePos = 51 |
| TLK1 | 37 | 103 | 951 | R (A/G) | A | 238 | silent | T | gnl\|dbSNP\|ss1515375_allelePos = 51 |
| SGK071 | 38 | 104 | None | — | — | — | — | — | — |
| SK516 | 39 | 105 | None | — | — | — | — | — | — |
| H85389 | 40 | 106 | None | — | — | — | — | — | — |
| Wee1b/SGK46 | 41 | 107 | None | — | — | — | — | — | — |
| Wnk2 | 42 | 108 | 7079 | K (G/T) | T | 3′ UTR | — | — | gnl\|dbSNP\|ss2899_allelePos = 78 |
| MAP3K1 | 43 | 109 | 2716 | R (A/G) | A | 906 | I/V | I | gnl\|dbSNP\|ss1317910_allelePos = 285 |
| MAP3K1 | 43 | 109 | 6227 | W (A/T) | A | 3′ UTR | — | — | gnl\|dbSNP\|ss1148242_allelePos = 109 |
| MAP3K1 | 43 | 109 | 5560 | R (A/G) | A | 3′ UTR | — | — | gnl\|dbSNP\|ss1286358_allelePos = 101 |
| MAP3K1 | 43 | 109 | 3187 | M (A/C) | C | 1063 | silent | R | gnl\|dbSNP\|ss1146312_allelePos = 101 |
| MAP3K1 | 43 | 109 | 6015 | R (A/G) | G | 3′ UTR | — | — | gnl\|dbSNP\|ss1146243_allelePos = 101 |
| MAP3K1 | 43 | 109 | 2416 | R (A/G) | A | 806 | N/D | N | gnl\|dbSNP\|ss1146310_allelePos = 101 |
| MAP3K1 | 43 | 109 | 1284 | R (A/G) | A | 428 | silent | T | gnl\|dbSNP\|ss1146300_allelePos = 101 |
| MAP3K8 | 44 | 110 | 247 | S (C/G) | G | 83 | Q/E | E | gnl\|dbSNP\|ss1394913_allelePos = 101 |
| MAP3K8 | 44 | 110 | 2485 | K (G/T) | T | 3′ UTR | — | — | gnl\|dbSNP\|ss1617_allelePos = 101 |
| MAP3K8 | 44 | 110 | 2298 | M (A/C) | A | 3′ UTR | — | — | gnl\|dbSNP\|ss1547718_allelePos = 51 |
| Pak4_m | 45 | 111 | None | — | — | — | — | — | — |
| STLK6 | 46 | 112 | 487 | R (A/G) | G | 82 | silent | T | gnl\|dbSNP\|ss1483412_allelePos = 100 |
| Map2K2 | 47 | 113 | 904 | M (A/C) | C | 219 | silent | I | gnl\|dbSNP\|ss1937135_allelePos = 201 |
| CCK4 | 48 | 114 | 3636 | Y (C/T) | T | 3′ UTR | — | — | gnl\|dbSNP\|ss1527472_allelePos = 51 |
| LMR1 | 49 | 115 | None | — | — | — | — | — | — |
| RYK | 50 | 116 | 2875 | R (A/G) | G | 3′ UTR | — | — | gnl\|dbSNP\|ss16914_allelePos = 101 |
| RYK | 50 | 116 | 2496 | W (A/T) | A | 3′ UTR | — | — | gnl\|dbSNP\|ss1525573_allelePos = 51 |
| RYK | 50 | 116 | 851 | R (A/G) | G | 254 | N/S | S | gnl\|dbSNP\|ss1525514_allelePos = 51 |
| RYK | 50 | 116 | 386 | R (A/G) | G | 99 | N/S | S | gnl\|dbSNP\|ss1525513_allelePos = 51 |
| RYK | 50 | 116 | 2764 | Y (C/T) | T | 3′ UTR | — | — | gnl\|dbSNP\|ss18913_allelePos = 31 |
| LRRK2 | 51 | 117 | 5425 | W (A/T) | T | 1598 | E/V | V | gnl\|dbSNP\|ss63276_allelePos = 97 |
| pMLK4 | 52 | 118 | 3597 | R (A/G) | A | 3′ UTR | — | — | gnl\|dbSNP\|ss2057123_allelePos = 323 |
| pMLK4 | 52 | 118 | 3914 | Y (C/T) | T | 3′ UTR | — | — | gnl\|dbSNP\|ss2057120_allelePos = 201 |
| pMLK4 | 52 | 118 | 3668 | Y (C/T) | C | 3′ UTR | — | — | gnl\|dbSNP\|ss2057122_allelePos = 288 |
| pMLK4 | 52 | 118 | 3800 | Y (C/T) | C | 3′ UTR | — | — | gnl\|dbSNP\|ss2057121_allelePos = 22 |
| pMLK4 | 52 | 118 | 2580 | Y (C/T) | C | 773 | silent | S | gnl\|dbSNP\|ss1411720_allelePos = 519 |
| pMLK4 | 52 | 118 | 2611 | K (G/T) | T | 784 | G/C | C | gnl\|dbSNP\|ss1411719_allelePos = 488 |
| pMLK4 | 52 | 118 | 4193 | R (A/G) | A | 3′ UTR | — | — | gnl\|dbSNP\|ss2057119_allelePos = 201 |
| pMLK4 | 52 | 118 | 4309 | Y (C/T) | C | 3′ UTR | — | — | gnl\|dbSNP\|ss2057118_allelePos = 201 |
| KSR | 53 | 119 | 4096 | S (C/G) | C | 3′ UTR | — | — | gnl\|dbSNP\|ss100899_allelePos = 172 |
| KSR2 | 54 | 120 | 612 | S (C/G) | C | 204 | silent | T | gnl\|dbSNP\|ss2005788_allelePos = 201 |
| KIAA1646 | 55 | 121 | 3769 | M (A/C) | A | 3′ UTR | — | — | gnl\|dbSNP\|ss2052346_allelePos = 499 |
| KIAA1646 | 55 | 121 | 3020 | Y (C/T) | T | 3′ UTR | — | — | gnl\|dbSNP\|ss2052345_allelePos = 201 |
| KIAA1646 | 55 | 121 | 2577 | K (G/T) | T | 3′ UTR | — | — | gnl\|dbSNP\|ss2052344_allelePos = 201 |
| KIAA1646 | 55 | 121 | 2391 | R (A/G) | A | 3′ UTR | — | — | gnl\|dbSNP\|ss2052344_allelePos = 201 |
| KIAA1646 | 55 | 121 | 4272 | R (A/G) | A | 3′ UTR | — | — | gnl\|dbSNP\|ss2052347_allelePos = 201 |
| DGK-beta | 56 | 122 | None | — | — | — | — | — | — |
| IP6K1 | 57 | 123 | 3669 | Y (C/T) | C | 3′ UTR | — | — | gnl\|dbSNP\|ss1522850_allelePos = 51 |
| IP6K1 | 57 | 123 | 2851 | R (A/G) | G | 3′ UTR | — | — | gnl\|dbSNP\|ss1522846_allelePos = 51 |
| YAB1 | 58 | 124 | 2506 | R (A/G) | G | 3′ UTR | — | — | gnl\|dbSNP\|ss1305707_allelePos = 99 |
| YAB1 | 58 | 124 | 1538 | Y (C/T) | C | 480 | silent | F | gnl\|dbSNP\|ss1529336_allelePos = 51 |
| AF052122 | 59 | 125 | None | — | — | — | — | — | — |
| AAF23326 | 60 | 126 | None | — | — | — | — | — | — |
| SGK493 | 61 | 127 | 1094 | R (A/G) | A | 349 | R/G | R | gnl\|dbSNP\|ss1826551_allelePos = 201 |
| SGK493 | 61 | 127 | 1690 | Y (C/T) | T | 547 | silent | A | gnl\|dbSNP\|ss1826528_allelePos = 201 |
| BRD2 | 62 | 128 | 920 | K (G/T) | T | 5′ UTR | — | — | gnl\|dbSNP\|ss1425392_allelePos = 324 |
| BRD2 | 62 | 128 | 1794 | R (A/G) | A | 31 | silent | K | gnl\|dbSNP\|ss686785_allelePos = 201 |
| BRD2 | 62 | 128 | 3510 | Y (C/T) | T | 603 | silent | S | gnl\|dbSNP\|rs516535_allelePos = 201 |
| BRD2 | 62 | 128 | 2413 | Y (C/T) | C | 238 | L/F | L | gnl\|dbSNP\|ss1973307_allelePos = 201 |
| BRD2 | 62 | 128 | 3199 | K (G/T) | G | 500 | E/stop | E | gnl\|dbSNP\|ss15121_allelePos = 101 |
| BRD2 | 62 | 128 | 3333 | R (A/G) | G | 544 | silent | K | gnl\|dbSNP\|ss13218_allelePos = 101 |
| BRD2 | 62 | 128 | 4348 | M (A/C) | C | 3′ UTR | 3′ UTR | — | gnl\|dbSNP\|ss12998_allelePos = 101 |
| BRD2 | 62 | 128 | 3411 | Y (C/T) | T | 570 | silent | D | gnl\|dbSNP\|ss1550506_allelePos = 51 |
| BRD2 | 62 | 128 | 1344 | R (A/G) | G | 5′ UTR | — | — | gnl\|dbSNP\|ss1550446_allelePos = 51 |
| BRD2 | 62 | 128 | 4416 | Y (C/T) | T | 3′ UTR | — | — | gnl\|dbSNP\|ss1550446_allelePos = 51 |
| BRD2 | 62 | 128 | 4219 | Y (C/T) | C | 3′ UTR | — | — | gnl\|dbSNP\|ss1523158_allelePos = 51 |
| BRD2 | 62 | 128 | 3342 | R (A/G) | G | 547 | silent | R | gnl\|dbSNP\|ss1523069_allelePos = 51 |
| BRD2 | 62 | 128 | 811 | Y (C/T) | C | 5′ UTR | — | — | gnl\|dbSNP\|ss1522874_allelePos = 51 |
| BRD2 | 62 | 128 | 2379 | S (C/G) | G | 226 | silent | L | gnl\|dbSNP\|ss18333_allelePos = 31 |
| BRD3 | 63 | 129 | 2405 | Y (C/T) | T | 3′ UTR | — | — | gnl\|dbSNP\|ss575919_allelePos = 201 |
| BRD3 | 63 | 129 | 1075 | R (A/G) | G | 312 | silent | L | gnl\|dbSNP\|ss630265_allelePos = 201 |
| BRD3 | 63 | 129 | 1975 | Y (C/T) | C | 612 | silent | D | gnl\|dbSNP\|ss601346_allelePos = 201 |
| BRD3 | 63 | 129 | 1423 | Y (C/T) | C | 428 | silent | P | gnl\|dbSNP\|ss34964_allelePos = 201 |
| BRD3 | 63 | 129 | 2934 | Y (C/T) | C | 3′ UTR | — | — | gnl\|dbSNP\|ss617401_allelePos = 101 |
| BRD3 | 63 | 129 | 2796 | Y (C/T) | C | 3′ UTR | — | — | gnl\|dbSNP\|ss1527035_allelePos = 51 |
| BRD4 | 64 | 130 | 1846 | R (A/G) | G | 542 | N/D | D | gnl\|dbSNP\|ss1512910_allelePos = 51 |
| BRDT | 65 | 131 | 821 | M (A/C) | A | 238 | K/N | K | gnl\|dbSNP\|ss1559581_allelePos = 482 |
| BRDT | 65 | 131 | 2976 | M (A/C) | C | 3′ UTR | — | — | gnl\|dbSNP\|ss1553268_allelePos = 51 |
| BRDT | 65 | 131 | 2785 | M (A/C) | C | 893 | Q/P | P | gnl\|dbSNP\|ss1553264_allelePos = 51 |
| BRDT | 65 | 131 | 1114 | M (A/C) | C | 336 | stop/S | S | gnl\|dbSNP\|ss1553262_allelePos = 51 |
| BRDT | 65 | 131 | 1113 | W (A/T) | T | 336 | Y/S | S | gnl\|dbSNP\|ss1553261_allelePos = 51 |
| BRDT | 65 | 131 | 2882 | M (A/C) | C | 925 | silent | A | gnl\|dbSNP\|ss1553267_allelePos = 51 |
| BRDT | 65 | 131 | 2851 | M (A/C) | C | 915 | Q/P | P | gnl\|dbSNP\|ss1553266_allelePos = 51 |
| BRDT | 65 | 131 | 2846 | M (A/C) | C | 913 | silent | A | gnl\|dbSNP\|ss1553265_allelePos = 51 |
| ZC1 | 66 | 132 | 1382 | R (A/G) | A | 418 | silent | E | gnl\|dbSNP\|rs1139583_allelePos = 51 |
| ZC1 | 66 | 132 | 2684 | S (C/G) | G | 852 | silent | S | gnl\|dbSNP\|rs1042916_allelePos = 51 |

[1036] TABLE 4
Protein Domains

| | | | | | | Do- | Do- | Pro- | | | |
|---|---|---|---|---|---|---|---|---|---|---|---|
| | | | | Profile | | main | main | file | Profile | Profile | Query |
| Gene | ID#na | ID#aa | Profile Description | Accession | Pscore | Start | End | Start | End | Length | Length |
| CRIK | 1 | 67 | Protein kinase domain | PF00069 | 9.20E−67 | 98 | 361 | 1 | 278 | 278 | 2055 |
| CRIK | 1 | 67 | CNH domain | PF00780 | 2.60E−115 | 1620 | 1917 | 1 | 378 | 378 | 2055 |
| CRIK | 1 | 67 | PH domain | PF00169 | 3.00E−16 | 1472 | 1591 | 1 | 85 | 85 | 2055 |
| CRIK | 1 | 67 | Phorbol esters/diacylglycerol | PF00130 | 1.00E−09 | 1391 | 1439 | 1 | 51 | 51 | 2055 |
| | | | binding domain (C1 domain) | | | | | | | | |
| CRIK | 1 | 67 | Protein kinase C terminal domain | PF00433 | 3.00E−08 | 362 | 391 | 1 | 32 | 70 | 2055 |
| DMPK2 | 2 | 68 | Protein kinase domain | PF00069 | 2.10E−70 | 71 | 337 | 1 | 278 | 278 | 1572 |
| DMPK2 | 2 | 68 | Phorbol esters/diacylglycerol | PF00130 | 3.10E−17 | 887 | 935 | 1 | 51 | 51 | 1572 |
| | | | binding domain (C1 domain) | | | | | | | | |
| DMPK2 | 2 | 68 | PH domain | PF00169 | 1.70E−16 | 956 | 1074 | 1 | 85 | 85 | 1572 |
| DMPK2 | 2 | 68 | CNH domain | PF00780 | 1.50E−12 | 1100 | 1380 | 1 | 378 | 378 | 1572 |
| DMPK2 | 2 | 68 | Protein kinase C terminal domain | PF00433 | 2.00E−08 | 351 | 366 | 16 | 31 | 70 | 1572 |
| MAST3 | 3 | 69 | Protein kinase domain | PF00069 | 5.50E−74 | 389 | 535 | 1 | 149 | 294 | 1331 |
| MAST3 | 3 | 69 | Protein kinase domain | PF00069 | 5.50E−74 | 560 | 662 | 158 | 294 | 294 | 1331 |
| MAST3 | 3 | 69 | PDZ domain | PF00595 | 3.70E−09 | 972 | 1054 | 1 | 79 | 84 | 1331 |
| MAST205 | 4 | 70 | Protein kinase domain | PF00069 | 7.90E−80 | 512 | 785 | 1 | 278 | 278 | 1798 |
| MAST205 | 4 | 70 | PDZ domain | PF00595 | 2.20E−10 | 1104 | 1191 | 1 | 83 | 83 | 1798 |
| | | | (Also known as DHR or GLGF) | | | | | | | | |
| MASTL | 5 | 71 | Protein kinase domain | PF00069 | 2.20E−73 | 35 | 310 | 1 | 278 | 278 | 878 |
| MASTL | 5 | 71 | Protein kinase domain | PF00069 | 2.20E−73 | 739 | 834 | 149 | 278 | 278 | 878 |
| MASTL | 5 | 71 | Protein kinase C terminal domain | PF00433 | 4.60E−07 | 835 | 863 | 1 | 31 | 70 | 878 |
| PKC_eta | 6 | 72 | Protein kinase domain | PF00069 | 3.60E−82 | 355 | 614 | 1 | 294 | 294 | 683 |
| PKC_eta | 6 | 72 | Phorbol esters/diacylglycerol | PF00130 | 4.40E−46 | 172 | 222 | 1 | 51 | 51 | 683 |
| | | | binding domain (C1 domain) | | | | | | | | |
| PKC_eta | 6 | 72 | Phorbol esters/diacylglycerol | PF00130 | 4.40E−46 | 246 | 295 | 1 | 51 | 51 | 683 |
| | | | binding domain (C1 domain) | | | | | | | | |
| PKC_eta | 6 | 72 | Protein kinase C terminal domain | PF00433 | 1.80E−41 | 615 | 681 | 1 | 70 | 70 | 683 |
| H19102 | 7 | 73 | Protein kinase domain | PF00069 | 3.20E−64 | 146 | 398 | 1 | 278 | 278 | 449 |
| MSK1 | 8 | 74 | Protein kinase domain | PF00069 | 1.60E−182 | 49 | 318 | 1 | 278 | 278 | 802 |
| MSK1 | 8 | 74 | Protein kinase domain | PF00069 | 1.60E−182 | 427 | 687 | 2 | 278 | 278 | 802 |
| MSK1 | 8 | 74 | Protein kinase C terminal domain | PF00043 | 2.40E−21 | 319 | 382 | 1 | 70 | 70 | 802 |
| YANK3 | 9 | 75 | Protein kinase domain | PF00069 | 3.80E−71 | 93 | 345 | 1 | 287 | 294 | 486 |
| MARK2 | 10 | 76 | Protein kinase domain | PF00069 | 1.30E−100 | 53 | 304 | 1 | 294 | 294 | 787 |
| MARK2 | 10 | 76 | Kinase associated domain 1 | PF02149 | 3.00E−21 | 738 | 787 | 1 | 50 | 50 | 787 |
| MARK2 | 10 | 76 | UBA/TS-N domain | PF00627 | 0.000003 | 324 | 363 | 1 | 45 | 45 | 787 |
| NuaK2 | 11 | 77 | Protein kinase domain | PF00069 | 8.00E−94 | 97 | 347 | 1 | 294 | 294 | 672 |
| BRSK2 | 12 | 78 | Protein kinase domain | PF00069 | 3.20E−97 | 19 | 270 | 1 | 278 | 278 | 674 |
| MARK4 | 13 | 79 | Protein kinase domain | PF00069 | 7.70E−104 | 59 | 310 | 1 | 278 | 278 | 752 |
| MARK4 | 13 | 79 | Kinase associated domain 1 | PF02149 | 1.30E−15 | 703 | 752 | 1 | 50 | 50 | 752 |
| MARK4 | 13 | 79 | UBA domain | PF00627 | 6.30E−11 | 330 | 368 | 1 | 41 | 41 | 752 |
| DCAMKL2 | 14 | 80 | Protein kinase domain | PF00069 | 1.70E−97 | 394 | 651 | 1 | 278 | 278 | 766 |
| PIM2 | 15 | 81 | Protein kinase domain | PF00069 | 1.40E−71 | 132 | 386 | 1 | 294 | 294 | 434 |
| PIM3 | 16 | 82 | Protein kinase domain | PF00069 | 9.90E−80 | 40 | 293 | 1 | 278 | 278 | 326 |
| TSSK4 | 17 | 83 | Protein kinase domain | PF00069 | 1.10E−78 | 25 | 293 | 1 | 278 | 278 | 328 |
| CKIL2 | 18 | 84 | Protein kinase domain | PF00069 | 8.50E−33 | 21 | 276 | 1 | 265 | 278 | 1244 |
| PCTAIRE3 | 19 | 85 | Protein kinase domain | PF00069 | 1.20E−87 | 50 | 331 | 1 | 278 | 278 | 380 |
| PFTAIRE2 | 20 | 86 | Protein kinase domain | PF00069 | 4.40E−80 | 103 | 387 | 1 | 278 | 278 | 435 |
| ERK7 | 21 | 87 | Protein kinase domain | PF00069 | 4.80E−90 | 13 | 323 | 1 | 278 | 278 | 563 |
| CKIIa-rs | 22 | 88 | Protein kinase domain | PF00069 | 2.20E−89 | 39 | 324 | 1 | 278 | 278 | 391 |
| DYRK4 | 23 | 89 | Protein kinase domain | PF00069 | 4.00E−64 | 506 | 802 | 1 | 278 | 278 | 921 |
| HIPK1 | 24 | 90 | Protein kinase domain | PF00069 | 6.20E−58 | 190 | 518 | 1 | 278 | 278 | 1210 |
| HIPK4 | 25 | 91 | Protein kinase domain | PF00069 | 1.10E−58 | 11 | 347 | 1 | 278 | 278 | 616 |
| BIKE | 26 | 92 | Protein kinase domain | PF00069 | 2.50E−38 | 51 | 314 | 1 | 294 | 294 | 1161 |
| NEK10 | 27 | 93 | Protein kinase domain | PF00069 | 8.80E−70 | 519 | 783 | 1 | 294 | 294 | 1125 |
| NEK10 | 27 | 93 | Armadillo/beta-catenin-like repeat | PF00514 | 0.009707 | 198 | 238 | 1 | 40 | 40 | 1125 |
| NEK10 | 27 | 93 | Armadillo/beta-catenin-like repeat | PP00514 | 0.009707 | 239 | 279 | 1 | 40 | 40 | 1125 |
| NEK10 | 27 | 93 | Armadillo/beta-catenin-like repeat | PF00514 | 0.009707 | 280 | 320 | 1 | 40 | 40 | 1125 |
| pNEK5 | 28 | 94 | Protein kinase domain | PF00069 | 9.10E−87 | 61 | 316 | 1 | 294 | 294 | 889 |
| NEK1 | 29 | 95 | Protein kinase domain | PF00069 | 2.50E−89 | 4 | 258 | 1 | 278 | 278 | 1286 |
| NEK3 | 30 | 96 | Protein kinase domain | PF00069 | 5.60E−92 | 4 | 257 | 1 | 278 | 278 | 506 |
| SGK069 | 31 | 97 | Protein kinase domain | PF00069 | 3.80E−40 | 62 | 325 | 1 | 263 | 278 | 348 |
| SGK110 | 32 | 98 | Protein kinase domain | PF00069 | 1.70E−39 | 98 | 359 | 1 | 273 | 278 | 414 |
| NRBP2 | 33 | 99 | Protein kinase domain | PF00069 | 2.00E−24 | 38 | 313 | 1 | 278 | 278 | 507 |
| CNK | 34 | 100 | Protein kinase domain | PF00069 | 1.60E−91 | 62 | 314 | 1 | 278 | 278 | 646 |
| CNK | 34 | 100 | POLO box duplicated region. | PF00659 | 9.70E−35 | 470 | 533 | 1 | 77 | 77 | 646 |
| CNK | 34 | 100 | POLO box duplicated region. | PF00659 | 9.70E−35 | 567 | 637 | 1 | 77 | 77 | 646 |
| SCYL2 | 35 | 101 | Protein kinase domain | PF00069 | 8.00E−13 | 32 | 327 | 1 | 278 | 278 | 933 |
| SRPK2 | 36 | 102 | Protein kinase domain | PF00069 | 7.40E−42 | 81 | 686 | 1 | 278 | 278 | 688 |
| TLK1 | 37 | 103 | Protein kinase domain | PF00069 | 4.70E−71 | 477 | 755 | 1 | 278 | 278 | 787 |
| SGK071 | 38 | 104 | Protein kinase domain | PF00069 | 7.60E−26 | 28 | 296 | 27 | 278 | 278 | 632 |
| SK516 | 39 | 105 | Protein kinase domain | PF00069 | 2.50E−44 | 652 | 915 | 1 | 278 | 278 | 929 |
| H85389 | 40 | 106 | Protein kinase domain | PF00069 | 3.90E−60 | 69 | 397 | 1 | 278 | 278 | 401 |
| Wee1b | 41 | 107 | Protein kinase domain | PF00069 | 1.10E−49 | 212 | 486 | 1 | 272 | 278 | 567 |
| Wnk2 | 42 | 108 | Protein kinase domain | PF00069 | 6.60E−63 | 181 | 439 | 1 | 278 | 278 | 2245 |
| MAP3K1 | 43 | 109 | Protein kinase domain | PF00069 | 1.00E−85 | 1242 | 1507 | 1 | 278 | 278 | 1511 |
| MAP3K8 | 44 | 110 | Protein kinase domain | PF00069 | 2.10E−88 | 468 | 731 | 1 | 278 | 278 | 735 |
| Pak4 | 45 | 111 | Protein kinase domain | PF00069 | 5.00E−86 | 323 | 574 | 1 | 278 | 278 | 593 |
| Pak4 | 45 | 111 | P21-Rho-binding domain | PF00786 | 3.20E−12 | 11 | 69 | 1 | 64 | 64 | 593 |
| STLK6-rs | 46 | 112 | Protein kinase domain | PF00069 | 2.60E−33 | 58 | 369 | 14 | 278 | 278 | 418 |
| MAP2K2 | 47 | 113 | Protein kinase domain | PF00069 | 3.20E−58 | 72 | 369 | 1 | 278 | 278 | 381 |
| CCK4 | 48 | 114 | Protein kinase domain | PF00069 | 6.70E−63 | 796 | 1061 | 1 | 272 | 278 | 1070 |
| CCK4 | 48 | 114 | Immunoglobulin domain | PF00047 | 1.00E−61 | 46 | 103 | 1 | 45 | 45 | 1070 |
| CCK4 | 48 | 114 | Immunoglobulin domain | PF00047 | 1.00E−61 | 143 | 202 | 1 | 45 | 45 | 1070 |
| CCK4 | 48 | 114 | Immunoglobulin domain | PF00047 | 1.00E−61 | 239 | 303 | 1 | 45 | 45 | 1070 |
| CCK4 | 48 | 114 | Immunoglobulin domain | PF00047 | 1.00E−61 | 336 | 393 | 1 | 45 | 45 | 1070 |
| CCK4 | 48 | 114 | Immunoglobulin domain | PF00047 | 1.00E−61 | 426 | 483 | 1 | 45 | 45 | 1070 |
| CCK4 | 48 | 114 | Immunoglobulin domain | PF00047 | 1.00E−61 | 517 | 572 | 1 | 45 | 45 | 1070 |
| CCK4 | 48 | 114 | Immunoglobulin domain | PF00047 | 1.00E−61 | 606 | 666 | 1 | 45 | 45 | 1070 |
| LMR1 | 49 | 115 | Protein kinase domain | PF00069 | 1.10E−46 | 125 | 395 | 1 | 294 | 294 | 1374 |
| RYK | 50 | 116 | Protein kinase domain | PF00069 | 3.10E−81 | 330 | 596 | 1 | 276 | 278 | 607 |
| RYK | 50 | 115 | WIF domain | PF02019 | 3.30E−91 | 66 | 194 | 1 | 132 | 132 | 607 |
| LRRK2 | 51 | 117 | Protein kinase domain | PF00069 | 1.00E−41 | 1886 | 2138 | 8 | 272 | 278 | 2534 |
| LRRK2 | 51 | 117 | Leucine Rich Repeat | PF00560 | 2.10E−34 | 983 | 1004 | 1 | 23 | 23 | 2534 |
| LRRK2 | 51 | 117 | Leucine Rich Repeat | PF00560 | 2.10E−34 | 1012 | 1035 | 1 | 23 | 23 | 2534 |
| LRRK2 | 51 | 117 | Leucine Rich Repeat | PF00560 | 2.10E−34 | 1036 | 1058 | 1 | 23 | 23 | 2534 |
| LRRK2 | 51 | 117 | Leucine Rich Repeat | PF00560 | 2.10E−34 | 1084 | 1103 | 1 | 23 | 23 | 2534 |
| LRRK2 | 51 | 117 | Leucine Rich Repeat | PF00560 | 2.10E−34 | 1108 | 1129 | 1 | 23 | 23 | 2534 |
| LRRK2 | 51 | 117 | Leucine Rich Repeat | PF00560 | 2.10E−34 | 1130 | 1153 | 1 | 23 | 23 | 2534 |
| LRRK2 | 51 | 117 | Leucine Rich Repeat | PF00560 | 2.10E−34 | 1174 | 1196 | 1 | 23 | 23 | 2534 |
| LRRK2 | 51 | 117 | Leucine Rich Repeat | PF00560 | 2.10E−34 | 1197 | 1218 | 1 | 23 | 23 | 2534 |
| LRRK2 | 51 | 117 | Leucine Rich Repeat | PF00560 | 2.10E−34 | 1221 | 1244 | 1 | 23 | 23 | 2534 |
| LRRK2 | 51 | 117 | Leucine Rich Repeat | PF00560 | 2.10E−34 | 1246 | 1268 | 1 | 23 | 23 | 2534 |
| LRRK2 | 51 | 117 | Leucine Rich Repeat | PF00560 | 2.10E−34 | 1269 | 1293 | 1 | 23 | 23 | 2534 |
| pMLK4 | 52 | 118 | Protein kinase domain | PF00069 | 1.70E−87 | 124 | 398 | 1 | 292 | 294 | 1036 |
| pMLK4 | 52 | 118 | SH3 domain | PF00018 | 2.00E−14 | 45 | 100 | 5 | 58 | 58 | 1036 |
| KSR | 53 | 119 | Protein kinase domain | PF00069 | 1.40E−31 | 591 | 731 | 1 | 147 | 294 | 901 |
| KSR | 53 | 119 | Protein kinase domain | PF00069 | 1.40E−31 | 753 | 792 | 163 | 195 | 294 | 901 |
| KSR | 53 | 119 | Phorbol esters/diacylglycerol | PF00130 | 0.008623 | 348 | 391 | 1 | 51 | 51 | 901 |
| | | | binding domain (C1 domain) | | | | | | | | |
| KSR | 53 | 119 | MYND finger | PF01753 | 1.311685 | 360 | 377 | 1 | 21 | 43 | 901 |
| KSR2 | 54 | 120 | Protein kinase domain | PF00069 | 6.90E−40 | 698 | 957 | 1 | 289 | 294 | 982 |
| KSR2 | 54 | 120 | Phorbol esters/diacylglycerol | PF00130 | 0.000127 | 445 | 488 | 1 | 51 | 51 | 982 |
| | | | binding domain (C1 domain) | | | | | | | | |
| KIAA1646 | 55 | 121 | Diacylglycerol kinase catalytic domain | PF00781 | 2.50E−09 | 132 | 278 | 1 | 159 | 159 | 537 |
| DGK-beta | 56 | 122 | Diacylglycerol kinase accessory domain | PF00609 | 3.30E−129 | 582 | 762 | 1 | 190 | 190 | 804 |
| DGK-beta | 56 | 122 | Diacylglycerol kinase catalytic domain | PF00781 | 1.20E−71 | 438 | 562 | 1 | 159 | 159 | 804 |
| DGK-beta | 56 | 122 | Phorbol esters/diacylglycerol | PF00130 | 5.00E−28 | 245 | 294 | 1 | 51 | 51 | 804 |
| | | | binding domain (C1 domain) | | | | | | | | |
| DGK-beta | 56 | 122 | Phorbol esters/diacylglycerol | PF00130 | 5.00E−28 | 310 | 358 | 1 | 51 | 51 | 804 |
| | | | binding domain (C1 domain) | | | | | | | | |
| DGK-beta | 56 | 122 | EF hand | PF00036 | 4.10E−17 | 153 | 181 | 1 | 29 | 29 | 804 |
| DGK-beta | 56 | 122 | EF hand | PF00036 | 4.10E−17 | 198 | 226 | 1 | 29 | 29 | 804 |
| IP6K1 | 57 | 123 | No domain identified | | | | | | | | |
| YAB1 | 58 | 124 | ABC1 family | PF03109 | 1.20E−42 | 318 | 434 | 1 | 124 | 124 | 647 |
| AF052122 | 59 | 125 | No domain identified | | | | | | | | |
| AAF23326 | 60 | 126 | No domain identified | | | | | | | | |
| SGK493 | 61 | 127 | No domain identified | | | | | | | | |
| BRD2 | 62 | 128 | Bromodomain | PF00439 | 4.90E−91 | 79 | 168 | 1 | 92 | 92 | 801 |
| BRD2 | 62 | 128 | Bromodomain | PF00439 | 4.90E−91 | 352 | 441 | 1 | 92 | 92 | 801 |
| BRD3 | 63 | 129 | Bromodomain | PF00439 | 6.50E−87 | 39 | 128 | 1 | 92 | 92 | 726 |
| BRD3 | 63 | 129 | Bromodomain | PF00439 | 6.50E−87 | 315 | 403 | 1 | 92 | 92 | 726 |
| BRD4 | 64 | 130 | Bromodomain | PF00439 | 1.80E−90 | 63 | 152 | 1 | 92 | 92 | 722 |
| BRD4 | 64 | 130 | Bromodomain | PF00439 | 1.80E−90 | 356 | 445 | 1 | 92 | 92 | 722 |
| BRDT | 65 | 131 | Bromodomain | PF00439 | 7.50E−86 | 32 | 121 | 1 | 92 | 92 | 947 |
| BRDT | 65 | 131 | Bromodomain | PF00439 | 7.50E−86 | 275 | 364 | 1 | 92 | 92 | 947 |
| ZC1 | 66 | 132 | CNH | PF00780 | 9.20E−131 | 1066 | 1372 | 1 | 378 | 378 | 1392 |
| ZC1 | 66 | 132 | Protein kinase domain | PF00069 | 1.40E−91 | 25 | 289 | 1 | 278 | 278 | 1392 |

[1037] TABLE 5
Chromosomal Data

| Gene_NAME | Sp | ID#na | ID#aa | Cytogenetic position | Cancer Amplicon | Disease Loci |
|---|---|---|---|---|---|---|
| CRIK | H | 1 | 67 | 12q24.31 | | |
| DMPK2 | H | 2 | 68 | 11q12-q13.1 | 13q13-q14 | Osteoarthritis OMIM 165720 |
| MAST3 | H | 3 | 69 | 19p13.1 | | |
| MAST205 | H | 4 | 70 | 1p34.1 | | |
| MASTL | H | 5 | 71 | 10p11.2-p12.1 | | Schizophrenia, OMIM 181500 |
| PKC_eta | H | 6 | 72 | 14q23.1 | | |
| HI9102 | H | 7 | 73 | 17q11.1 | 17q12-q21 | |
| MSK1 | H | 8 | 74 | 14q32.11 | | |
| YANK3 | H | 9 | 75 | 10q26.3 | | |
| MARK2 | H | 10 | 76 | 11q12-11q13 | 11q13-q14 | Osteoarthritis OMIM 165720 |
| NuaK2 | H | 11 | 77 | 1q31-q32.1 | | |
| BRSK2 | H | 12 | 78 | 11p15.5 | | |
| MARK4 | H | 13 | 79 | 19q13.2-q13.33 | 19cen-q13.3 | |
| DCAMKL2 | H | 14 | 80 | 4q31.3 | | |
| PIM2 | H | 15 | 81 | Xp11.23 | Xp11.2-p21 | |
| PIM3 | H | 16 | 82 | 22q13 | | |
| TSSK4 | H | 17 | 83 | 14q11.1 | | |
| CKIL2 | H | 18 | 84 | 15q14-q15.3 | | Schizophrenia, 15q15, OMIM 181500 |
| PCTAIRE3 | H | 19 | 85 | 1q32 | | |
| PCTAIRE2 | H | 20 | 86 | 2q33.2-q34 | 2q31-q33 | Purmonary Hypertension, 2q33, OMIM 178600; |
| | | | | | | Osteoarthritis, 2q34-q35, OMIM 140600 |
| ERK7 | H | 21 | 87 | 8q24.3 | | |
| CKIla-rs | H | 22 | 88 | 11p15 | | |
| DYRK4 | H | 23 | 89 | 12p13 | | Hypertension, essential, 12p13, OMIM 145500 |
| HIPK1 | H | 24 | 90 | 1p11-p12 | | |
| HIPK4 | H | 25 | 91 | 19q13.1 | 19cen-q13.3 | |
| BIKE | H | 26 | 92 | 4q13-q21.21 | | Osteoarthritis OMIM 165720 |
| NEK10 | H | 27 | 93 | 3p21.33 | | |
| pNEK5 | H | 28 | 94 | 13q14 | 13q14 | |
| NEK1 | H | 29 | 95 | 4q33-q34 | | |
| NEK3 | H | 30 | 96 | 13q14.3 | 13q14 | |
| SGK069 | H | 31 | 97 | 19q13.43 | | |
| SGK110 | H | 32 | 98 | 19q13.43 | | |
| NRBP2 | H | 33 | 99 | 8q24.3 | | |
| CNK | H | 34 | 100 | 1p34.1 | | |
| SCYL2 | H | 35 | 101 | 12q23-q24.1 | | |
| SRPK2 | H | 36 | 102 | 7q22.3 | 7q21-q22 | |
| TLK1 | H | 37 | 103 | 2q31.1 | | Osteoarthritis OMIM 165720 |
| SGK07.1 | H | 38 | 104 | 9q34 | | |
| SK516 | H | 39 | 105 | 1q31-32.1 | | |
| H85389 | H | 40 | 106 | 20p13 | | |
| Wee1b | H | 41 | 107 | 7q34-36 | | |
| Wnk2 | H | 42 | 108 | 9q22.31 | | |
| MAP3K1 | H | 43 | 109 | 5q11.2-q13 | | Schizophrenia, 15q11-q13, OMIM 181500 |
| MAP3K8 | H | 44 | 110 | 2q21.3 | | |
| Pak4_m | M | 45 | 111 | murine | | |
| STLK6-rs | H | 46 | 112 | 1p33 | | |
| MAP2K2 | H | 47 | 113 | 7q34 | | |
| CCK4 | H | 48 | 114 | 6p21-p12 | | |
| LMR1 | H | 49 | 115 | 17q25 | | |
| RYK | H | 50 | 116 | 3q22 | | |
| LRRK2 | H | 51 | 117 | 12q11-q12 | | |
| pMLK4 | H | 52 | 118 | 1q42.2 | | |
| KSR | H | 53 | 119 | 17q11.1 | 17q12-q21 | |
| KSR2 | H | 54 | 120 | 12q24.3 | | |
| KIAA1646 | H | 55 | 121 | 22q13.31 | | |
| DGK-beta | H | 56 | 122 | 7p21.3-p22 | | Osteoarthritis OMIM 165720 |
| IP6K1 | H | 57 | 123 | 3p21.31 | | |
| YAB1 | H | 58 | 124 | 1q42 | | Schizophrenia, 1q42.1, OMIM 181500 |
| AF052122 | H | 59 | 125 | 19q13.1 | 19cen-q13.3 | |
| AAF23326 | H | 60 | 126 | 14q24.3-q32 | | |
| SGK493 | H | 61 | 127 | 5q14 | | |
| BRD2 | H | 62 | 128 | 6p21.2 | | |
| BRD3 | H | 63 | 129 | 9q34 | | |
| BRD4 | H | 64 | 130 | 19p13.2 | | |
| BRDT | H | 65 | 131 | 1p21 | | |
| ZC1 | H | 66 | 132 | 2q11.1-q11.2 | | |

[1038] TABLE 6
Human ESTs

| Rank | Gene | Human EST |
|---|---|---|
| 1 | CRIK_H_SEQID#NA_1 | BQ070955.1 |
| 2 | CRIK_H_SEQID#NA_1 | BQ071141.1 |
| 3 | CRIK_H_SEQID#NA_1 | BQ228524.1 |
| 4 | CRIK_H_SEQID#NA_1 | BM545592.1 |
| 5 | CRIK_H_SEQID#NA_1 | BI253509.1 |
| 6 | CRIK_H_SEQID#NA_1 | BG912161.1 |
| 7 | CRIK_H_SEQID#NA_1 | BG252350.1 |
| 8 | CRIK_H_SEQID#NA_1 | BG120427.1 |
| 9 | CRIK_H_SEQID#NA_1 | BE875297.1 |
| 10 | CRIK_H_SEQID#NA_1 | BQ448184.1 |
| 1 | DMPK2_H_SEQID#NA_2 | BI793270.1 |
| 2 | DMPK2_H_SEQID#NA_2 | BI792977.1 |
| 3 | DMPK2_H_SEQID#NA_2 | BG752641.1 |
| 4 | DMPK2_H_SEQID#NA_2 | BG752641.1 |
| 5 | DMPK2_H_SEQID#NA_2 | AW516225.1 |
| 6 | DMPK2_H_SEQID#NA_2 | BG678034.1 |
| 7 | DMPK2_H_SEQID#NA_2 | AA809737.1 |
| 8 | DMPK2_H_SEQID#NA_2 | BE793390.1 |
| 9 | DMPK2_H_SEQID#NA_2 | BE793390.1 |
| 10 | DMPK2_H_SEQID#NA_2 | AW814108.1 |
| 1 | MAST3_H_SEQID#NA_3 | BG765138.1 |
| 2 | MAST3_H_SEQID#NA_3 | BG767919.1 |
| 3 | MAST3_H_SEQID#NA_3 | BF684640.1 |
| 4 | MAST3_H_SEQID#NA_3 | BF346524.1 |
| 5 | MAST3_H_SEQID#NA_3 | BE261265.1 |
| 6 | MAST3_H_SEQID#NA_3 | BF346384.1 |
| 7 | MAST3_H_SEQID#NA_3 | BG257232.1 |
| 8 | MAST3_H_SEQID#NA_3 | BF689544.1 |
| 9 | MAST3_H_SEQID#NA_3 | BI907332.1 |
| 10 | MAST3_H_SEQID#NA_3 | BM966751.1 |
| 1 | MAST205_H_SEQID#NA_4 | BQ231137.1 |
| 2 | MAST205_H_SEQID#NA_4 | BQ070626.1 |
| 3 | MAST205_H_SEQID#NA_4 | AL568230.1 |
| 4 | MAST205_H_SEQID#NA_4 | BQ050660.1 |
| 5 | MAST205_H_SEQID#NA_4 | BM471504.1 |
| 6 | MAST205_H_SEQID#NA_4 | BG831571.1 |
| 7 | MAST205_H_SEQID#NA_4 | AL540100.1 |
| 8 | MAST205_H_SEQID#NA_4 | BI771067.1 |
| 9 | MAST205_H_SEQID#NA_4 | BG762487.1 |
| 10 | MAST205_H_SEQID#NA_4 | BG676428.1 |
| 1 | MASTL_H_SEQID#NA_5 | AL541215.1 |
| 2 | MASTL_H_SEQID#NA_5 | AL520252.1 |
| 3 | MASTL_H_SEQID#NA_5 | BQ441178.1 |
| 4 | MASTL_H_SEQID#NA_5 | BM550518.1 |
| 5 | MASTL_H_SEQID#NA_5 | BQ224736.1 |
| 6 | MASTL_H_SEQID#NA_5 | BM721150.1 |
| 7 | MASTL_H_SEQID#NA_5 | AL712023.1 |
| 8 | MASTL_H_SEQID#NA_5 | BM679574.1 |
| 9 | MASTL_H_SEQID#NA_5 | BG027109.1 |
| 10 | MASTL_H_SEQID#NA_5 | BM748750.1 |
| 1 | PKC_eta_H_SEQID#NA_6 | BM920615.1 |
| 2 | PKC_eta_H_SEQID#NA_6 | BM457208.1 |
| 3 | PKC_eta_H_SEQID#NA_6 | BQ051772.1 |
| 4 | PKC_eta_H_SEQID#NA_6 | AU136862.1 |
| 5 | PKC_eta_H_SEQID#NA_6 | BI913495.1 |
| 6 | PKC_eta_H_SEQID#NA_6 | BG820252.1 |
| 7 | PKC_eta_H_SEQID#NA_6 | BM549890.1 |
| 8 | PKC_eta_H_SEQID#NA_6 | BE161764.1 |
| 9 | PKC_eta_H_SEQID#NA_6 | BG719560.1 |
| 10 | PKC_eta_H_SEQID#NA_6 | BQ006934.1 |
| 1 | H19102_H_SEQID#NA_7 | BI546006.1 |
| 2 | H19102_H_SEQID#NA_7 | BF954472.1 |
| 3 | H19102_H_SEQID#NA_7 | BQ363219.1 |
| 4 | H19102_H_SEQID#NA_7 | H19102.1 |
| 5 | H19102_H_SEQID#NA_7 | BF362477.1 |
| 6 | H19102_H_SEQID#NA_7 | BF362466.1 |
| 7 | H19102_H_SEQID#NA_7 | BF362458.1 |
| 8 | H19102_H_SEQID#NA_7 | AA808745.1 |
| 9 | H19102_H_SEQID#NA_7 | BE968821.1 |
| 10 | H19102_H_SEQID#NA_7 | BE968821.1 |
| 1 | MSK1_H_SEQID#NA_8 | BM556986.1 |
| 2 | MSK1_H_SEQID#NA_8 | BM453259.1 |
| 3 | MSK1_H_SEQID#NA_8 | BG684373.1 |
| 4 | MSK1_H_SEQID#NA_8 | BM968829.1 |
| 5 | MSK1_H_SEQID#NA_8 | BI088037.1 |
| 6 | MSK1_H_SEQID#NA_8 | BE410965.1 |
| 7 | MSK1_H_SEQID#NA_8 | BG699153.1 |
| 8 | MSK1_H_SEQID#NA_8 | AA314565.1 |
| 9 | MSK1_H_SEQID#NA_8 | BM475296.1 |
| 10 | MSK1_H_SEQID#NA_8 | BM690068.1 |
| 1 | YANK3_H_SEQID#NA_9 | BI917132.1 |
| 2 | YANK3_H_SEQID#NA_9 | BI257653.1 |
| 3 | YANK3_H_SEQID#NA_9 | BG824303.1 |
| 4 | YANK3_H_SEQID#NA_9 | BG282899.1 |
| 5 | YANK3_H_SEQID#NA_9 | BM702426.1 |
| 6 | YANK3_H_SEQID#NA_9 | AW245946.1 |
| 7 | YANK3_H_SEQID#NA_9 | AW245503.1 |
| 8 | YANK3_H_SEQID#NA_9 | BG719068.1 |
| 9 | YANK3_H_SEQID#NA_9 | BM666731.1 |
| 10 | YANK3_H_SEQID#NA_9 | BF446773.1 |
| 1 | MARK2_H_SEQID#NA_10 | BM550195.1 |
| 2 | MARK2_H_SEQID#NA_10 | BE795309.1 |
| 3 | MARK2_H_SEQID#NA_10 | BG825423.1 |
| 4 | MARK2_H_SEQID#NA_10 | BE798169.1 |
| 5 | MARK2_H_SEQID#NA_10 | BI521469.1 |
| 6 | MARK2_H_SEQID#NA_10 | AU133733.1 |
| 7 | MARK2_H_SEQID#NA_10 | BE397682.1 |
| 8 | MARK2_H_SEQID#NA_10 | BG822223.1 |
| 9 | MARK2_H_SEQID#NA_10 | BI911013.1 |
| 10 | MARK2_H_SEQID#NA_10 | BE280645.1 |
| 1 | NuaK2_H_SEQID#NA_11 | BM927376.1 |
| 2 | NuaK2_H_SEQID#NA_11 | BQ062868.1 |
| 3 | NuaK2_H_SEQID#NA_11 | BQ064231.1 |
| 4 | NuaK2_H_SEQID#NA_11 | BQ059508.1 |
| 5 | NuaK2_H_SEQID#NA_11 | BQ060729.1 |
| 6 | NuaK2_H_SEQID#NA_11 | BM909401.1 |
| 7 | NuaK2_H_SEQID#NA_11 | BQ056806.1 |
| 8 | NuaK2_H_SEQID#NA_11 | BQ065633.1 |
| 9 | NuaK2_H_SEQID#NA_11 | BQ064127.1 |
| 10 | NuaK2_H_SEQID#NA_11 | BQ056490.1 |
| 1 | BRSK2_H_SEQID#NA_12 | AL538014.1 |
| 2 | BRSK2_H_SEQID#NA_12 | BG395625.1 |
| 3 | BRSK2_H_SEQID#NA_12 | BI825755.1 |
| 4 | BRSK2_H_SEQID#NA_12 | BM677936.1 |
| 5 | BRSK2_H_SEQID#NA_12 | BG395884.1 |
| 6 | BRSK2_H_SEQID#NA_12 | BM805756.1 |
| 7 | BRSK2_H_SEQID#NA_12 | BE251924.1 |
| 8 | BRSK2_H_SEQID#NA_12 | BE550940.1 |
| 9 | BRSK2_H_SEQID#NA_12 | BF525960.1 |
| 10 | BRSK2_H_SEQID#NA_12 | BE259121.1 |
| 1 | MARK4_H_SEQID#NA_13 | BG745114.1 |
| 2 | MARK4_H_SEQID#NA_13 | BM543319.1 |
| 3 | MARK4_H_SEQID#NA_13 | BQ066239.1 |
| 4 | MARK4_H_SEQID#NA_13 | BG389721.1 |
| 5 | MARK4_H_SEQID#NA_13 | BF982422.1 |
| 6 | MARK4_H_SEQID#NA_13 | BM467107.1 |
| 7 | MARK4_H_SEQID#NA_13 | BG744466.1 |
| 8 | MARK4_H_SEQID#NA_13 | BG760697.1 |
| 9 | MARK4_H_SEQID#NA_13 | BF686388.1 |
| 10 | MARK4_H_SEQID#NA_13 | BM999847.1 |
| 1 | DCAMKL2_H_SEQID#NA_14 | BM467980.1 |
| 2 | DCAMKL2_H_SEQID#NA_14 | BI034992.1 |
| 3 | DCAMKL2_H_SEQID#NA_14 | BI035543.1 |
| 4 | DCAMKL2_H_SEQID#NA_14 | BF943256.1 |
| 5 | DCAMKL2_H_SEQID#NA_14 | BF943502.1 |
| 6 | DCAMKL2_H_SEQID#NA_14 | BF362270.1 |
| 7 | DCAMKL2_H_SEQID#NA_14 | BF963919.1 |
| 8 | DCAMKL2_H_SEQID#NA_14 | BF362283.1 |
| 9 | DCAMKL2_H_SEQID#NA_14 | BQ217828.1 |
| 10 | DCAMKL2_H_SEQID#NA_14 | BF886988.1 |
| 1 | PIM2_H_SEQID#NA_15 | BM457909.1 |
| 2 | PIM2_H_SEQID#NA_15 | BM459453.1 |
| 3 | PIM2_H_SEQID#NA_15 | BM464831.1 |
| 4 | PIM2_H_SEQID#NA_15 | AU124437.1 |
| 5 | PIM2_H_SEQID#NA_15 | BI908737.1 |
| 6 | PIM2_H_SEQID#NA_15 | BI546781.1 |
| 7 | PIM2_H_SEQID#NA_15 | AU125921.1 |
| 8 | PIM2_H_SEQID#NA_15 | BI253854.1 |
| 9 | PIM2_H_SEQID#NA_15 | BG705716.1 |
| 10 | PIM2_H_SEQID#NA_15 | BM008442.1 |
| 1 | PIM3_H_SEQID#NA_16 | AL525596.1 |
| 2 | PIM3_H_SEQID#NA_16 | AL549520.1 |
| 3 | PIM3_H_SEQID#NA_16 | AL570770.1 |
| 4 | PIM3_H_SEQID#NA_16 | AL523928.1 |
| 5 | PIM3_H_SEQID#NA_16 | AL570076.1 |
| 6 | PIM3_H_SEQID#NA_16 | BI753308.1 |
| 7 | PIM3_H_SEQID#NA_16 | AL519345.1 |
| 8 | PIM3_H_SEQID#NA_16 | AL543684.1 |
| 9 | PIM3_H_SEQID#NA_16 | BG744856.1 |
| 10 | PIM3_H_SEQID#NA_16 | AL562787.1 |
| 1 | TSSK4_H_SEQID#NA_17 | BE551971.1 |
| 2 | TSSK4_H_SEQID#NA_17 | AI075923.1 |
| 3 | TSSK4_H_SEQID#NA_17 | BI825382.1 |
| 4 | TSSK4_H_SEQID#NA_17 | H87255.1 |
| 5 | TSSK4_H_SEQID#NA_17 | BF510751.1 |
| 6 | TSSK4_H_SEQID#NA_17 | BF510751.1 |
| 7 | TSSK4_H_SEQID#NA_17 | AW296282.1 |
| 8 | TSSK4_H_SEQID#NA_17 | AI218614.1 |
| 9 | TSSK4_H_SEQID#NA_17 | AI218614.1 |
| 10 | TSSK4_H_SEQID#NA_17 | AI365148.1 |
| 1 | CKIL2_H_SEQID#NA_18 | AL530844.1 |
| 2 | CKIL2_H_SEQID#NA_18 | BQ439549.1 |
| 3 | CKIL2_H_SEQID#NA_18 | AL577840.1 |
| 4 | CKIL2_H_SEQID#NA_18 | AL555305.1 |
| 5 | CKIL2_H_SEQID#NA_18 | AL705762.1 |
| 6 | CKIL2_H_SEQID#NA_18 | BE548084.1 |
| 7 | CKIL2_H_SEQID#NA_18 | BF433088.1 |
| 8 | CKIL2_H_SEQID#NA_18 | BE222107.1 |
| 9 | CKIL2_H_SEQID#NA_18 | AW294686.1 |
| 10 | CKIL2_H_SEQID#NA_18 | BG718751.1 |
| 1 | PCTAIRE3_H_SEQID#NA_19 | AL520700.1 |
| 2 | PCTAIRE3_H_SEQID#NA_19 | AL528335.1 |
| 3 | PCTAIRE3_H_SEQID#NA_19 | AL520699.1 |
| 4 | PCTAIRE3_H_SEQID#NA_19 | BM457869.1 |
| 5 | PCTAIRE3_H_SEQID#NA_19 | BQ437828.1 |
| 6 | PCTAIRE3_H_SEQID#NA_19 | BM549437.1 |
| 7 | PCTAIRE3_H_SEQID#NA_19 | BM045832.1 |
| 8 | PCTAIRE3_H_SEQID#NA_19 | BG912679.1 |
| 9 | PCTAIRE3_H_SEQID#NA_19 | BE747807.1 |
| 10 | PCTAIRE3_H_SEQID#NA_19 | BF345421.1 |
| 1 | PFTAIRE2_H_SEQID#NA_20 | BI755983.1 |
| 2 | PFTAIRE2_H_SEQID#NA_20 | BE562611.1 |
| 3 | PFTAIRE2_H_SEQID#NA_20 | BG326162.1 |
| 4 | PFTAIRE2_H_SEQID#NA_20 | AA436054.1 |
| 5 | PFTAIRE2_H_SEQID#NA_20 | AA435956.1 |
| 6 | PFTAIRE2_H_SEQID#NA_20 | BG249066.1 |
| 7 | PFTAIRE2_H_SEQID#NA_20 | BG249066.1 |
| 8 | PFTAIRE2_H_SEQID#NA_20 | BG772738.1 |
| 9 | PFTAIRE2_H_SEQID#NA_20 | BG720115.1 |
| 10 | PFTAIRE2_H_SEQID#NA_20 | W03371.1 |
| 1 | ERK7_H_SEQID#NA_21 | AL537138.1 |
| 2 | ERK7_H_SEQID#NA_21 | AL537137.1 |
| 3 | ERK7_H_SEQID#NA_21 | BM553342.1 |
| 4 | ERK7_H_SEQID#NA_21 | BM553342.1 |
| 5 | ERK7_H_SEQID#NA_21 | BE464560.1 |
| 6 | ERK7_H_SEQID#NA_21 | AI049667.1 |
| 7 | ERK7_H_SEQID#NA_21 | AJ403115.1 |
| 8 | ERK7_H_SEQID#NA_21 | AI476756.1 |
| 9 | ERK7_H_SEQID#NA_21 | AI921266.1 |
| 10 | ERK7_H_SEQID#NA_21 | AI680380.1 |
| 1 | CKIIa-rs_H_SEQID#NA_22 | AL559846.1 |
| 2 | CKIIa-rs_H_SEQID#NA_22 | AL560958.1 |
| 3 | CKIIa-rs_H_SEQID#NA_22 | AU131772.1 |
| 4 | CKIIa-rs_H_SEQID#NA_22 | AU120646.1 |
| 5 | CKIIa-rs_H_SEQID#NA_22 | BI258630.1 |
| 6 | CKIIa-rs_H_SEQID#NA_22 | AU133318.1 |
| 7 | CKIIa-rs_H_SEQID#NA_22 | AU133037.1 |
| 8 | CKIIa-rs_H_SEQID#NA_22 | AU125134.1 |
| 9 | CKIIa-rs_H_SEQID#NA_22 | AL582368.1 |
| 10 | CKIIa-rs_H_SEQID#NA_22 | AU117006.1 |
| 1 | DYRK4_H_SEQID#NA_23 | AL561586.1 |
| 2 | DYRK4_H_SEQID#NA_23 | AL582755.1 |
| 3 | DYRK4_H_SEQID#NA_23 | BG721331.1 |
| 4 | DYRK4_H_SEQID#NA_23 | BM041899.1 |
| 5 | DYRK4_H_SEQID#NA_23 | BI559381.1 |
| 6 | DYRK4_H_SEQID#NA_23 | BM042712.1 |
| 7 | DYRK4_H_SEQID#NA_23 | BI459242.1 |
| 8 | DYRK4_H_SEQID#NA_23 | BI459242.1 |
| 9 | DYRK4_H_SEQID#NA_23 | BF431376.1 |
| 10 | DYRK4_H_SEQID#NA_23 | AI066522.1 |
| 1 | HIPK1_H_SEQID#NA_24 | BQ224060.1 |
| 2 | HIPK1_H_SEQID#NA_24 | BM476759.1 |
| 3 | HIPK1_H_SEQID#NA_24 | BM724085.1 |
| 4 | HIPK1_H_SEQID#NA_24 | BG742609.1 |
| 5 | HIPK1_H_SEQID#NA_24 | BG681186.1 |
| 6 | HIPK1_H_SEQID#NA_24 | BG676057.1 |
| 7 | HIPK1_H_SEQID#NA_24 | AW166113.1 |
| 8 | HIPK1_H_SEQID#NA_24 | BG498068.1 |
| 9 | HIPK1_H_SEQID#NA_24 | BG612475.1 |
| 10 | HIPK1_H_SEQID#NA_24 | BE877361.1 |
| 1 | HIPK4_H_SEQID#NA_25 | BM554291.1 |
| 2 | HIPK4_H_SEQID#NA_25 | BG772881.1 |
| 3 | HIPK4_H_SEQID#NA_25 | BI827147.1 |
| 4 | HIPK4_H_SEQID#NA_25 | BI561789.1 |
| 5 | HIPK4_H_SEQID#NA_25 | BG105231.1 |
| 6 | HIPK4_H_SEQID#NA_25 | BG771831.1 |
| 7 | HIPK4_H_SEQID#NA_25 | BG720082.1 |
| 8 | HIPK4_H_SEQID#NA_25 | AI806773.1 |
| 9 | HIPK4_H_SEQID#NA_25 | AI001807.1 |
| 10 | HIPK4_H_SEQID#NA_25 | M62294.1 |
| 1 | BIKE_H_SEQID#NA_26 | BI755383.1 |
| 2 | BIKE_H_SEQID#NA_26 | AW968082.1 |
| 3 | BIKE_H_SEQID#NA_26 | BG776990.1 |
| 4 | BIKE_H_SEQID#NA_26 | BG485573.1 |
| 5 | BIKE_H_SEQID#NA_26 | AW968084.1 |
| 6 | BIKE_H_SEQID#NA_26 | AI939552.1 |
| 7 | BIKE_H_SEQID#NA_26 | AL546234.1 |
| 8 | BIKE_H_SEQID#NA_26 | AW967339.1 |
| 9 | BIKE_H_SEQID#NA_26 | BI461241.1 |
| 10 | BIKE_H_SEQID#NA_26 | BI461241.1 |
| 1 | NEK10_H_SEQID#NA_27 | AI652681.1 |
| 2 | NEK10_H_SEQID#NA_27 | BM976126.1 |
| 3 | NEK10_H_SEQID#NA_27 | AI962584.1 |
| 4 | NEK10_H_SEQID#NA_27 | AA954906.1 |
| 5 | NEK10_H_SEQID#NA_27 | BG717420.1 |
| 6 | NEK10_H_SEQID#NA_27 | AA889152.1 |
| 7 | NEK10_H_SEQID#NA_27 | AA429606.1 |
| 8 | NEK10_H_SEQID#NA_27 | BM976173.1 |
| 9 | NEK10_H_SEQID#NA_27 | AA430250.1 |
| 10 | NEK10_H_SEQID#NA_27 | BI462787.1 |
| 1 | pNEK5_H_SEQID#NA_28 | AA398536.1 |
| 2 | pNEK5_H_SEQID#NA_28 | AA393108.1 |
| 3 | pNEK5_H_SEQID#NA_28 | AI627290.1 |
| 1 | NEK1_H_SEQID#NA_29 | AV700007.1 |
| 2 | NEK1_H_SEQID#NA_29 | AV700747.1 |
| 3 | NEK1_H_SEQID#NA_29 | AI936517.1 |
| 4 | NEK1_H_SEQID#NA_29 | AV699533.1 |
| 5 | NEK1_H_SEQID#NA_29 | BG290898.1 |
| 6 | NEK1_H_SEQID#NA_29 | AV700291.1 |
| 7 | NEK1_H_SEQID#NA_29 | AI816275.1 |
| 8 | NEK1_H_SEQID#NA_29 | AV699817.1 |
| 9 | NEK1_H_SEQID#NA_29 | BG706222.1 |
| 10 | NEK1_H_SEQID#NA_29 | AW976435.1 |
| 1 | NEK3_H_SEQID#NA_30 | BQ432111.1 |
| 2 | NEK3_H_SEQID#NA_30 | BI093553.1 |
| 3 | NEK3_H_SEQID#NA_30 | AI971454.1 |
| 4 | NEK3_H_SEQID#NA_30 | AI191920.1 |
| 5 | NEK3_H_SEQID#NA_30 | AI659549.1 |
| 6 | NEK3_H_SEQID#NA_30 | BI754945.1 |
| 7 | NEK3_H_SEQID#NA_30 | AW043698.1 |
| 8 | NEK3_H_SEQID#NA_30 | AI627473.1 |
| 9 | NEK3_H_SEQID#NA_30 | BM984985.1 |
| 10 | NEK3_H_SEQID#NA_30 | AA873814.1 |
| 1 | SGK069_H_SEQID#NA_31 | None |
| 1 | SGK110_H_SEQID#NA_32 | None |
| 1 | NRBP2_H_SEQID#NA_33 | AL564934.1 |
| 2 | NRBP2_H_SEQID#NA_33 | BG108500.1 |
| 3 | NRBP2_H_SEQID#NA_33 | BQ014431.1 |
| 4 | NRBP2_H_SEQID#NA_33 | BQ182709.1 |
| 5 | NRBP2_H_SEQID#NA_33 | BG913260.1 |
| 6 | NRBP2_H_SEQID#NA_33 | AW962453.1 |
| 7 | NRBP2_H_SEQID#NA_33 | BM709377.1 |
| 8 | NRBP2_H_SEQID#NA_33 | BF944679.1 |
| 9 | NRBP2_H_SEQID#NA_33 | BG571713.1 |
| 10 | NRBP2_H_SEQID#NA_33 | BG576689.1 |
| 1 | CNK_H_SEQID#NA_34 | BG675045.1 |
| 2 | CNK_H_SEQID#NA_34 | BM927202.1 |
| 3 | CNK_H_SEQID#NA_34 | BE250216.1 |
| 4 | CNK_H_SEQID#NA_34 | BQ065567.1 |
| 5 | CNK_H_SEQID#NA_34 | BE515113.1 |
| 6 | CNK_H_SEQID#NA_34 | BE783099.1 |
| 7 | CNK_H_SEQID#NA_34 | BQ228988.1 |
| 8 | CNK_H_SEQID#NA_34 | BF205939.1 |
| 9 | CNK_H_SEQID#NA_34 | AI951666.1 |
| 10 | CNK_H_SEQID#NA_34 | BQ066297.1 |
| 1 | SCYL2_H_SEQID#NA_35 | BM905696.1 |
| 2 | SCYL2_H_SEQID#NA_35 | AL563032.1 |
| 3 | SCYL2_H_SEQID#NA_35 | AL700123.1 |
| 4 | SCYL2_H_SEQID#NA_35 | AU130771.1 |
| 5 | SCYL2_H_SEQID#NA_35 | AL528010.1 |
| 6 | SCYL2_H_SEQID#NA_35 | AU120073.1 |
| 7 | SCYL2_H_SEQID#NA_35 | BE614405.1 |
| 8 | SCYL2_H_SEQID#NA_35 | BM459956.1 |
| 9 | SCYL2_H_SEQID#NA_35 | BM786779.1 |
| 10 | SCYL2_H_SEQID#NA_35 | BF982530.1 |
| 1 | SRPK2_H_SEQID#NA_36 | BM464185.1 |
| 2 | SRPK2_H_SEQID#NA_36 | BQ428104.1 |
| 3 | SRPK2_H_SEQID#NA_36 | AL521820.1 |
| 4 | SRPK2_H_SEQID#NA_36 | AL045362.1 |
| 5 | SRPK2_H_SEQID#NA_36 | AL521821.1 |
| 6 | SRPK2_H_SEQID#NA_36 | AU124932.1 |
| 7 | SRPK2_H_SEQID#NA_36 | BG200431.1 |
| 8 | SRPK2_H_SEQID#NA_36 | BG389934.1 |
| 9 | SRPK2_H_SEQID#NA_36 | BM979654.1 |
| 10 | SRPK2_H_SEQID#NA_36 | AI038250.1 |
| 1 | TLK1_H_SEQID#NA_37 | BM561353.1 |
| 2 | TLK1_H_SEQID#NA_37 | AL526362.1 |
| 3 | TLK1_H_SEQID#NA_37 | BI488932.1 |
| 4 | TLK1_H_SEQID#NA_37 | AU124094.1 |
| 5 | TLK1_H_SEQID#NA_37 | AU119119.1 |
| 6 | TLK1_H_SEQID#NA_37 | BM470340.1 |
| 7 | TLK1_H_SEQID#NA_37 | AU134085.1 |
| 8 | TLK1_H_SEQID#NA_37 | BG779394.1 |
| 9 | TLK1_H_SEQID#NA_37 | BM981774.1 |
| 10 | TLK1_H_SEQID#NA_37 | BM724955.1 |
| 1 | SGK071_H_SEQID#NA_38 | BI458908.1 |
| 2 | SGK071_H_SEQID#NA_38 | AL044935.1 |
| 3 | SGK071_H_SEQID#NA_38 | BQ184985.1 |
| 4 | SGK071_H_SEQID#NA_38 | AV763896.1 |
| 1 | SK516_H_SEQID#NA_39 | BM918041.1 |
| 2 | SK516_H_SEQID#NA_39 | BQ215537.1 |
| 3 | SK516_H_SEQID#NA_39 | BG479508.1 |
| 4 | SK516_H_SEQID#NA_39 | BG475168.1 |
| 5 | SK516_H_SEQID#NA_39 | BG473913.1 |
| 6 | SK516_H_SEQID#NA_39 | BG280828.1 |
| 7 | SK516_H_SEQID#NA_39 | BG763842.1 |
| 8 | SK516_H_SEQID#NA_39 | BQ279002.1 |
| 9 | SK516_H_SEQID#NA_39 | BI090323.1 |
| 10 | SK516_H_SEQID#NA_39 | BG033116.1 |
| 1 | H85389_H_SEQID#NA_40 | AW292935.1 |
| 2 | H85389_H_SEQID#NA_40 | BG875928.1 |
| 3 | H85389_H_SEQID#NA_40 | BG766602.1 |
| 4 | H85389_H_SEQID#NA_40 | BG766602.1 |
| 5 | H85389_H_SEQID#NA_40 | AW027321.1 |
| 6 | H85389_H_SEQID#NA_40 | AW027332.1 |
| 7 | H85389_H_SEQID#NA_40 | AL732079.1 |
| 8 | H85389_H_SEQID#NA_40 | BG875945.1 |
| 9 | H85389_H_SEQID#NA_40 | BG875933.1 |
| 1 | Wee1b_H_SEQID#NA_41 | BM790836.1 |
| 2 | Wee1b_H_SEQID#NA_41 | BG402079.1 |
| 1 | Wnk2_H_SEQID#NA_42 | BQ222235.1 |
| 2 | Wnk2_H_SEQID#NA_42 | AL534358.1 |
| 3 | Wnk2_H_SEQID#NA_42 | BM907282.1 |
| 4 | Wnk2_H_SEQID#NA_42 | BI546992.1 |
| 5 | Wnk2_H_SEQID#NA_42 | BI756222.1 |
| 6 | Wnk2_H_SEQID#NA_42 | BM678640.1 |
| 7 | Wnk2_H_SEQID#NA_42 | AW962621.1 |
| 8 | Wnk2_H_SEQID#NA_42 | BM689160.1 |
| 9 | Wnk2_H_SEQID#NA_42 | BF336877.1 |
| 10 | Wnk2_H_SEQID#NA_42 | AI637586.1 |
| 1 | MAP3K1_H_SEQID#NA_43 | AU132367.1 |
| 2 | MAP3K1_H_SEQID#NA_43 | AL133917.1 |
| 3 | MAP3K1_H_SEQID#NA_43 | BM928438.1 |
| 4 | MAP3K1_H_SEQID#NA_43 | BM928438.1 |
| 5 | MAP3K1_H_SEQID#NA_43 | AL042445.1 |
| 6 | MAP3K1_H_SEQID#NA_43 | AW499603.1 |
| 7 | MAP3K1_H_SEQID#NA_43 | BG119132.1 |
| 8 | MAP3K1_H_SEQID#NA_43 | BE162514.1 |
| 9 | MAP3K1_H_SEQID#NA_43 | BF216567.1 |
| 10 | MAP3K1_H_SEQID#NA_43 | BF216567.1 |
| 1 | MAP3K8_H_SEQID#NA_44 | BM969829.1 |
| 2 | MAP3K8_H_SEQID#NA_44 | BG484791.1 |
| 3 | MAP3K8_H_SEQID#NA_44 | BI832332.1 |
| 4 | MAP3K8_H_SEQID#NA_44 | N57475.1 |
| 5 | MAP3K8_H_SEQID#NA_44 | AI683447.1 |
| 6 | MAP3K8_H_SEQID#NA_44 | N47620.1 |
| 1 | STLK6-rs_H_SEQID#NA_46 | AL552387.1 |
| 2 | STLK6-rs_H_SEQID#NA_46 | AL515422.1 |
| 3 | STLK6-rs_H_SEQID#NA_46 | AL520217.1 |
| 4 | STLK6-rs_H_SEQID#NA_46 | AL520216.1 |
| 5 | STLK6-rs_H_SEQID#NA_46 | BM465416.1 |
| 6 | STLK6-rs_H_SEQID#NA_46 | BI825875.1 |
| 7 | STLK6-rs_H_SEQID#NA_46 | BI859101.1 |
| 8 | STLK6-rs_H_SEQID#NA_46 | AL558687.1 |
| 9 | STLK6-rs_H_SEQID#NA_46 | BI823806.1 |
| 10 | STLK6-rs_H_SEQID#NA_46 | BI765467.1 |
| 1 | MAP2K2_H_SEQID#NA_47 | BQ278839.1 |
| 2 | MAP2K2_H_SEQID#NA_47 | AL525264.1 |
| 3 | MAP2K2_H_SEQID#NA_47 | BM804931.1 |
| 4 | MAP2K2_H_SEQID#NA_47 | BM920109.1 |
| 5 | MAP2K2_H_SEQID#NA_47 | BI826639.1 |
| 6 | MAP2K2_H_SEQID#NA_47 | AL525439.1 |
| 7 | MAP2K2_H_SEQID#NA_47 | BG769213.1 |
| 8 | MAP2K2_H_SEQID#NA_47 | BE732844.1 |
| 9 | MAP2K2_H_SEQID#NA_47 | BG770148.1 |
| 10 | MAP2K2_H_SEQID#NA_47 | BG769998.1 |
| 1 | CCK4_H_SEQID#NA_48 | AL515621.1 |
| 2 | CCK4_H_SEQID#NA_48 | BM554494.1 |
| 3 | CCK4_H_SEQID#NA_48 | AL515620.1 |
| 4 | CCK4_H_SEQID#NA_48 | BM048660.1 |
| 5 | CCK4_H_SEQID#NA_48 | BM801688.1 |
| 6 | CCK4_H_SEQID#NA_48 | AL558185.1 |
| 7 | CCK4_H_SEQID#NA_48 | BI871758.1 |
| 8 | CCK4_H_SEQID#NA_48 | BM802337.1 |
| 9 | CCK4_H_SEQID#NA_48 | BG773310.1 |
| 10 | CCK4_H_SEQID#NA_48 | BF981652.1 |
| 1 | LMR1_H_SEQID#NA_49 | BI603257.1 |
| 2 | LMR1_H_SEQID#NA_49 | BF306070.1 |
| 3 | LMR1_H_SEQID#NA_49 | BM549649.1 |
| 4 | LMR1_H_SEQID#NA_49 | BG827921.1 |
| 5 | LMR1_H_SEQID#NA_49 | BI601257.1 |
| 6 | LMR1_H_SEQID#NA_49 | BM547656.1 |
| 7 | LMR1_H_SEQID#NA_49 | BG911396.1 |
| 8 | LMR1_H_SEQID#NA_49 | AL120105.1 |
| 9 | LMR1_H_SEQID#NA_49 | AV727368.1 |
| 10 | LMR1_H_SEQID#NA_49 | BI600711.1 |
| 1 | RYK_H_SEQID#NA_50 | BQ067310.1 |
| 2 | RYK_H_SEQID#NA_50 | BQ434679.1 |
| 3 | RYK_H_SEQID#NA_50 | BG740085.1 |
| 4 | RYK_H_SEQID#NA_50 | BG764027.1 |
| 5 | RYK_H_SEQID#NA_50 | AU130782.1 |
| 6 | RYK_H_SEQID#NA_50 | BI870859.1 |
| 7 | RYK_H_SEQID#NA_50 | BM450529.1 |
| 8 | RYK_H_SEQID#NA_50 | BG762507.1 |
| 9 | RYK_H_SEQID#NA_50 | AL038696.1 |
| 10 | RYK_H_SEQID#NA_50 | BG260940.1 |
| 1 | LRRK2_H_SEQID#NA_51 | BG189993.1 |
| 2 | LRRK2_H_SEQID#NA_51 | BM998398.1 |
| 3 | LRRK2_H_SEQID#NA_51 | AV705213.1 |
| 4 | LRRK2_H_SEQID#NA_51 | BF665089.1 |
| 5 | LRRK2_H_SEQID#NA_51 | AW958959.1 |
| 6 | LRRK2_H_SEQID#NA_51 | BF699250.1 |
| 7 | LRRK2_H_SEQID#NA_51 | BF669643.1 |
| 8 | LRRK2_H_SEQID#NA_51 | BF669643.1 |
| 9 | LRRK2_H_SEQID#NA_51 | BQ437477.1 |
| 10 | LRRK2_H_SEQID#NA_51 | BQ437477.1 |
| 1 | pMLK4_H_SEQID#NA_52 | BG824246.1 |
| 2 | pMLK4_H_SEQID#NA_52 | BI964128.1 |
| 3 | pMLK4_H_SEQID#NA_52 | BG540713.1 |
| 4 | pMLK4_H_SEQID#NA_52 | BI964177.1 |
| 5 | pMLK4_H_SEQID#NA_52 | BE867187.1 |
| 6 | pMLK4_H_SEQID#NA_52 | AW408639.1 |
| 7 | pMLK4_H_SEQID#NA_52 | BI963837.1 |
| 8 | pMLK4_H_SEQID#NA_52 | BF352800.1 |
| 9 | pMLK4_H_SEQID#NA_52 | BI963872.1 |
| 10 | pMLK4_H_SEQID#NA_52 | H67242.1 |
| 1 | KSR_H_SEQID#NA_53 | BI086433.1 |
| 2 | KSR_H_SEQID#NA_53 | BF528425.1 |
| 3 | KSR_H_SEQID#NA_53 | AI123553.1 |
| 4 | KSR_H_SEQID#NA_53 | BM989782.1 |
| 5 | KSR_H_SEQID#NA_53 | BI091489.1 |
| 6 | KSR_H_SEQID#NA_53 | AW963516.1 |
| 7 | KSR_H_SEQID#NA_53 | AI809969.1 |
| 8 | KSR_H_SEQID#NA_53 | AI458861.1 |
| 9 | KSR_H_SEQID#NA_53 | AI088028.1 |
| 10 | KSR_H_SEQID#NA_53 | AW166454.1 |
| 1 | KSR2_H_SEQID#NA_54 | BF948353.1 |
| 1 | KIAA1646_H_SEQID#NA_55 | BM479389.1 |
| 2 | KIAA1646_H_SEQID#NA_55 | BG754980.1 |
| 3 | KIAA1646_H_SEQID#NA_55 | BM453176.1 |
| 4 | KIAA1646_H_SEQID#NA_55 | BQ230294.1 |
| 5 | KIAA1646_H_SEQID#NA_55 | BQ054406.1 |
| 6 | KIAA1646_H_SEQID#NA_55 | BQ063738.1 |
| 7 | KIAA1646_H_SEQID#NA_55 | BG284450.1 |
| 8 | KIAA1646_H_SEQID#NA_55 | BQ057191.1 |
| 9 | KIAA1646_H_SEQID#NA_55 | BE898542.1 |
| 10 | KIAA1646_H_SEQID#NA_55 | BG750642.1 |
| 1 | DGK-beta_H_SEQID#NA_56 | BG912323.1 |
| 2 | DGK-beta_H_SEQID#NA_56 | BG201482.1 |
| 3 | DGK-beta_H_SEQID#NA_56 | BF949285.1 |
| 4 | DGK-beta_H_SEQID#NA_56 | BI032910.1 |
| 1 | IP6K1_H_SEQID#NA_57 | AL515350.1 |
| 2 | IP6K1_H_SEQID#NA_57 | AL537602.1 |
| 3 | IP6K1_H_SEQID#NA_57 | BM544669.1 |
| 4 | IP6K1_H_SEQID#NA_57 | BM546339.1 |
| 5 | IP6K1_H_SEQID#NA_57 | BQ232298.1 |
| 6 | IP6K1_H_SEQID#NA_57 | BQ053969.1 |
| 7 | IP6K1_H_SEQID#NA_57 | AL536739.1 |
| 8 | IP6K1_H_SEQID#NA_57 | BG468729.1 |
| 9 | IP6K1_H_SEQID#NA_57 | BG822723.1 |
| 10 | IP6K1_H_SEQID#NA_57 | BQ220938.1 |
| 1 | YAB1_H_SEQID#NA_58 | BM925217.1 |
| 2 | YAB1_H_SEQID#NA_58 | BI771908.1 |
| 3 | YAB1_H_SEQID#NA_58 | BM475528.1 |
| 4 | YAB1_H_SEQID#NA_58 | BM929585.1 |
| 5 | YAB1_H_SEQID#NA_58 | BQ067514.1 |
| 6 | YAB1_H_SEQID#NA_58 | AW964156.1 |
| 7 | YAB1_H_SEQID#NA_58 | BI829039.1 |
| 8 | YAB1_H_SEQID#NA_58 | BG541994.1 |
| 9 | YAB1_H_SEQID#NA_58 | BI871673.1 |
| 10 | YAB1_H_SEQID#NA_58 | BE797060.1 |
| 1 | AF052122_H_SEQID#NA_59 | BI833115.1 |
| 2 | AF052122_H_SEQID#NA_59 | BI227273.1 |
| 3 | AF052122_H_SEQID#NA_59 | BI226041.1 |
| 4 | AF052122_H_SEQID#NA_59 | BI226088.1 |
| 5 | AF052122_H_SEQID#NA_59 | BE562310.1 |
| 6 | AF052122_H_SEQID#NA_59 | BM458499.1 |
| 7 | AF052122_H_SEQID#NA_59 | BG324551.1 |
| 8 | AF052122_H_SEQID#NA_59 | BF057611.1 |
| 9 | AF052122_H_SEQID#NA_59 | BG779592.1 |
| 10 | AF052122_H_SEQID#NA_59 | BI117258.1 |
| 1 | AAF23326_H_SEQID#NA_60 | BI193027.1 |
| 2 | AAF23326_H_SEQID#NA_60 | BQ214713.1 |
| 3 | AAF23326_H_SEQID#NA_60 | AI907812.1 |
| 4 | AAF23326_H_SEQID#NA_60 | AA478358.1 |
| 5 | AAF23326_H_SEQID#NA_60 | AA459637.1 |
| 6 | AAF23326_H_SEQID#NA_60 | AA284562.1 |
| 7 | AAF23326_H_SEQID#NA_60 | AA401004.1 |
| 8 | AAF23326_H_SEQID#NA_60 | BM128250.1 |
| 9 | AAF23326_H_SEQID#NA_60 | BG219074.1 |
| 10 | AAF23326_H_SEQID#NA_60 | W88819.1 |
| 1 | SGK493_H_SEQID#NA_61 | BQ049234.1 |
| 2 | SGK493_H_SEQID#NA_61 | BM554462.1 |
| 3 | SGK493_H_SEQID#NA_61 | AL527674.1 |
| 4 | SGK493_H_SEQID#NA_61 | AL527675.1 |
| 5 | SGK493_H_SEQID#NA_61 | AU133075.1 |
| 6 | SGK493_H_SEQID#NA_61 | BI833907.1 |
| 7 | SGK493_H_SEQID#NA_61 | BI819237.1 |
| 8 | SGK493_H_SEQID#NA_61 | BM677568.1 |
| 9 | SGK493_H_SEQID#NA_61 | BI756523.1 |
| 10 | SGK493_H_SEQID#NA_61 | BG388681.1 |
| 1 | BRD2_H_SEQID#NA_62 | BQ222485.1 |
| 2 | BRD2_H_SEQID#NA_62 | BM800104.1 |
| 3 | BRD2_H_SEQID#NA_62 | BQ212470.1 |
| 4 | BRD2_H_SEQID#NA_62 | AU141190.1 |
| 5 | BRD2_H_SEQID#NA_62 | BQ054271.1 |
| 6 | BRD2_H_SEQID#NA_62 | AU143483.1 |
| 7 | BRD2_H_SEQID#NA_62 | BQ072172.1 |
| 8 | BRD2_H_SEQID#NA_62 | BI771111.1 |
| 9 | BRD2_H_SEQID#NA_62 | BI855660.1 |
| 10 | BRD2_H_SEQID#NA_62 | AU130987.1 |
| 1 | BRD3_H_SEQID#NA_63 | BQ072151.1 |
| 2 | BRD3_H_SEQID#NA_63 | BM807235.1 |
| 3 | BRD3_H_SEQID#NA_63 | BM799542.1 |
| 4 | BRD3_H_SEQID#NA_63 | AU131741.1 |
| 5 | BRD3_H_SEQID#NA_63 | BQ435244.1 |
| 6 | BRD3_H_SEQID#NA_63 | BM910839.1 |
| 7 | BRD3_H_SEQID#NA_63 | BM909939.1 |
| 8 | BRD3_H_SEQID#NA_63 | AU123823.1 |
| 9 | BRD3_H_SEQID#NA_63 | BI858783.1 |
| 10 | BRD3_H_SEQID#NA_63 | AU131644.1 |
| 1 | BRD4_H_SEQID#NA_64 | BG476527.1 |
| 2 | BRD4_H_SEQID#NA_64 | BM542719.1 |
| 3 | BRD4_H_SEQID#NA_64 | BQ218394.1 |
| 4 | BRD4_H_SEQID#NA_64 | BQ219777.1 |
| 5 | BRD4_H_SEQID#NA_64 | AU126004.1 |
| 6 | BRD4_H_SEQID#NA_64 | BG397005.1 |
| 7 | BRD4_H_SEQID#NA_64 | BM467005.1 |
| 8 | BRD4_H_SEQID#NA_64 | BG478389.1 |
| 9 | BRD4_H_SEQID#NA_64 | BQ214403.1 |
| 10 | BRD4_H_SEQID#NA_64 | BF314720.1 |
| 1 | BRDT_H_SEQID#NA_65 | BM552817.1 |
| 2 | BRDT_H_SEQID#NA_65 | BI830253.1 |
| 3 | BRDT_H_SEQID#NA_65 | BG150293.1 |
| 4 | BRDT_H_SEQID#NA_65 | BI827344.1 |
| 5 | BRDT_H_SEQID#NA_65 | BG718280.1 |
| 6 | BRDT_H_SEQID#NA_65 | BG717291.1 |
| 7 | BRDT_H_SEQID#NA_65 | BG718558.1 |
| 8 | BRDT_H_SEQID#NA_65 | AL705795.1 |
| 9 | BRDT_H_SEQID#NA_65 | BF057076.1 |
| 10 | BRDT_H_SEQID#NA_65 | AI656466.1 |
| 1 | ZC1_H_SEQID#NA_66 | BQ232312.1 |
| 2 | ZC1_H_SEQID#NA_66 | BQ221714.1 |
| 3 | ZC1_H_SEQID#NA_66 | BM927043.1 |
| 4 | ZC1_H_SEQID#NA_66 | BI915627.1 |
| 5 | ZC1_H_SEQID#NA_66 | BQ004320.1 |
| 6 | ZC1_H_SEQID#NA_66 | BI850450.1 |
| 7 | ZC1_H_SEQID#NA_66 | BQ014222.1 |
| 8 | ZC1_H_SEQID#NA_66 | BI224416.1 |
| 9 | ZC1_H_SEQID#NA_66 | BQ026964.1 |
| 10 | ZC1_H_SEQID#NA_66 | BG026496.1 |

The application's sequence listing, which the Patent Office published only in electronic form, follows.

SEQUENCE LISTING (143 sequences)

SEQ ID NO: 1 - DNA, 8656 bp, Homo sapiens
gggcggaacagatcgcagacctgggggttcgcagagccgccagtggggagatgttgaagttcaaatatggagcgcggaatcctttggatgctggtgctgctgaacccattgccagccgggcctccaggctgaatctgttcttccaggggaaaccaccctttatgactcaacagcagatgtctcctctttcccgagaagggatattagatgccctctttgttctctttgaagaatgcagtcagcctgctctgatgaagattaagcacgtgagcaactttgtcccggaagtgtattccgacaccatagctgagttacaggagctccagccttcggcaaaggacttcgaagtcagaagtcttgtaggttgtggtcactttgctgaagtgcaggtggtaagagagaaagcaaccggggacatctatgctatgaaagtgatgaagaagaaggctttattggcccaggagcaggtttcattttttgaggaagagcggaacatattatctcgaagcacaagcccgtggatcccccaattacagtatgcctttcaggacaaaaatcacctttatctggtcatggaatatcagcctggaggggacttgctgtcacttttgaatagatatgaggaccagttagatgaaaacctgatacagttttacctagctgagctgattttggctgttcacagcgttcatctgatgggatacgtgcatcgagacatcaagcctgagaacattctcgttgaccgcacaggacacatcaagctggtggattttggatctgccgcgaaaatgaattcaaacaagatggtgaatgccaaactcccgattgggaccccagattacatggctcctgaagtgctgactgtgatgaacggggatggaaaaggcacctacggcctggactgtgactggtggtcagtgggcgtgattgcctatgagatgatttatgggagatcccccttcgcagagggaacctctgccagaaccttcaataacattatgaatttccagcggtttttgaaatttccagatgaccccaaagtgagcagtgactttcttgatctgattcaaagcttgttgtgcggccagaaagagagactgaagtttgaaggtctttgctgccatcctttcttctctaaaattgactggaacaacattcgtaactctcctccccccttcgttcccaccctcaagtctgacgatgacacctccaattttgatgaaccagagaagaattcgtgggtttcatcctctccgtgccagctgagcccctcaggcttctcgggtgaagaactgccgtttgtggggttttcgtacagcaaggcactggggattcttggtagatctgagtctgttgtgtcgggtctggactcccctgccaagactagctccatggaaaagaaacttctcatcaaaagcaaagagctacaagactctcaggacaagtgtcacaagatggagcaggaaatgacccggttacatcggagagtgtcagaggtggaggctgtgcttagtcagaaggaggtggagctgaaggcctctgagactcagagatccctcctggagcaggaccttgctacctacatcacagaatgcagtagcttaaagcgaagtttggagcaagcacggatggaggtgtcccaggaggatgacaaagcactgcagcttctccatgatatcagagagcagagccggaagctccaagaaatcaaagagcaggagtaccaggctcaagtggaagaaatgaggttgatgatgaatcagttggaagaggatcttgtctcagcaagaagacggagtgatctctacgaatctgagctgagagagtctcggcttgctgctgaagaattcaagcggaaagcgacagaatgtcagcataaactgttgaaggctaaggatcaagggaagcctgaagtgggagaatatgcgaaactggagaagatcaatgctgagcagcagctcaaaattcaggagctccaagagaaactggagaaggctgtaaaagccagcacggaggccaccgagctgctgcagaatatccgccaggcaaaggagcgagccgagagggagctggagaagctgcagaaccgagaggattcttctgaaggcatcagaaagaagctggtggaagctgaggaacgccgccattctctggagaacaaggtaaagagactagagaccatggagcgtagagaaaacagactgaaggatgacatccagacaaaatcccaacagatccagcagatggctgataaaattctggagctcgaagagaaacatcgggaggcccaagtctcagcccagcacctagaagtgcacctgaaacagaaagagcagcactatgaggaaaagattaaagtgttggacaatcagataaagaaagacctggctgacaaggagacactggagaacatgatgcagagacacgaggaggaggcccatgagaagggcaaaattctcagcgaacagaaggcgatgatcaatgctatggattccaagatcagatccctggaacagaggattgtggaactgtctgaagccaataaacttgcagcaaatagcagtctttttacccaaaggaacatgaaggcccaagaagagatgatttctgaactcaggcaacagaaattttacctggagacacaggctgggaagttggaggcccagaaccgaaaactggaggagcagctggagaagatcagccaccaagaccacagtgacaagaatcggctgctggaactggagacaagattgcgggaggtcagtctagagcacgaggagcagaaactggagctcaagcgccagctcacagagctacagctctccctgcaggagcgcgagtcacagttgacagccctgcaggctgcacgggcggccctggagagccagcttcgccaggcgaagacagagctggaagagaccacagcagaagctgaagaggagatccaggcactcacggcacatagagatgaaatccagcgcaaatttgatgctcttcgtaacagctgtactgtaatcacagacctggaggagcagctaaaccagctgaccgaggacaacgctgaactcaacaaccaaaacttctacttgtccaaacaactcgatgaggcttctggcgccaacgacgagattgtacaactgcgaagtgaagtggaccatctccgccgggagatcacggaacgagagatgcagcttaccagccagaagcaaacgatggaggctctgaagaccacgtgcaccatgctggaggaacaggtcatggatttggaggccctaaacgatgagctgctagaaaaagagcggcagtgggaggcctggaggagcgtcctgggtgatgagaaatcccagtttgagtgtcgggttcgagagctgcagagaatgctggacaccgagaaacagagcagggcgagagccgatcagcggatcaccgagtctcgccaggtggtggagctggcagtgaaggagcacaaggctgagattctcgctctgcagcaggctctcaaagagcagaagctgaaggccgagagcctctctgacaagctcaatgacctggagaagaagcatgctatgcttgaaatgaatgcccgaagcttacagcagaagctggagactgaacgagagctcaaacagaggcttctggaagagcaagccaaattacagcagcagatggacctgcagaaaaatcacattttccgtctgactcaaggactgcaagaagctctagatcgggctgatctactgaagacagaaagaagtgacttggagtatcagctggaaaacattcaggttctctattctcatgaaaaggtgaaaatggaaggcactatttctcaacaaaccaaactcattgattttctgcaagccaaaatggaccaacctgctaaaaagaaaaaggttcctctgcagtacaatgagctgaagctggccctggagaaggagaaagctcgctgtgcagagctagaggaagcccttcagaagacccgcatcgagctccggtccgcccgggaggaagctgcccaccgcaaagcaacggaccacccacacccatccacgccagccaccgcgaggcagcagatcgccatgtccgccatcgtgcggtcgccagagcaccagcccagtgccatgagcctgctggccccgccatccagccgcagaaaggagtcttcaactccagaggaatttagtcggcgtcttaaggaacgcatgcaccacaatattcctcaccgattcaacgtaggactgaacatgcgagccacaaagtgtgctgtgtgtctggataccgtgcactttggacgccaggcatccaaatgtctcgaatgtcaggtgatgtgtcaccccaagtgctccacgtgcttgccagccacctgcggcttgcctgctgaatatgccacacacttcaccgaggccttctgccgtgacaaaatgaactccccaggtctccagaccaaggagcccagcagcagcttgcacctggaagggtggatgaaggtgcccaggaataacaaacgaggacagcaaggctgggacaggaagtacattgtcctggagggatcaaaagtcctcatttatgacaatgaagccagagaagctggacagaggccggtggaagaatttgagctgtgccttcccgacggggatgtatctattcatggtgccgttggtgcttccgaactcgcaaatacagccaaagcagatgtcccatacatactgaagatggaatctcacccgcacaccacctgctggcccgggagaaccctctacttgctagctcccagcttccctgacaaacagcgctgggtcaccgccttagaatcagttgtcgcaggtgggagagtttctagggaaaaagcagaagctgatgctaaactgcttggaaactccctgctgaaactggaaggtgatgaccgtctagacatgaactgcacgctgcccttcagtgaccaggtggtgttggtgggcaccgaggaagggctctacgccctgaatgtcttgaaaaactccctaacccatgtcccaggaattggagcagtcttccaaatttatattatcaaggacctggagaagctactcatgatagcaggagaagagcgggcactgtgtcttgtggacgtgaagaaagtgaaacagtccctggcccagtcccacctgcctgcccagcccgacatctcacccaacatttttgaagctgtcaagggctgccacttgtttggggcaggcaagattgagaacgggctctgcatctgtgcagccatgcccagcaaagtcgtcattctccgctacaacgaaaacctcagcaaatactgcatccggaaagagatagagacctcagagccctgcagctgtatccacttcaccaattacagtatcctcattggaaccaataaattctacgaaatcgacatgaagcagtacacgctcgaggaattcctggataagaatgaccattccttggcacctgctgtgtttgccgcctcttccaacagcttccctgtctcaatcgtgcaggtgaacagcgcagggcagcgagaggagtacttgctgtgtttccacgaatttggagtgttcgtggattcttacggaagacgtagccgcacagacgatctcaagtggagtcgcttacctttggcctttgcctacagagaaccctatctgtttgtgacccacttcaactcactcgaagtaattgagatccaggcacgctcctcagcagggacccctgcccgagcgtacctggacatcccgaacccgcgctacctgggccctgccatttcctcaggagcgatttacttggcgtcctcataccaggataaattaagggtcatttgctgcaagggaaacctcgtgaaggagtccggcactgaacaccaccggggcccgtccacctcccgcagcagccccaacaagcgaggcccacccacgtacaacgagcacatcaccaagcgcgtggcctccagcccagcgccgcccgaaggccccagccacccgcgagagccaagcacaccccaccgctaccgcgaggggcggaccgagctgcgcagggacaagtctcctggccgccccctggagcgagagaagtcccccggccggatgctcagcacgcggagagagcggtcccccgggaggctgtttgaagacagcagcaggggccggctgcctgcgggagccgtgaggaccccgctgtcccaggtgaacaaggtctgggaccagtcttcagtataaatctcagccagaaaaaccaactcctcatcttgatctgcaggaaaacaccaaacacactatggaactctgctgatggggacccaagcgcccacgtgctcagccaccctctggctcagcggggcccagacccacctcggcacggacacccctgtctccaggaggggcaggtggctgaggctcttcggagctgtcagcgcccggtgcctgccctgggcacctccctgcagtcatctctttgcactttgttactctttcaaagcattcacaaacttttgtacctagctctagcctgtaccagttagttcatcaaaggaaaccaaccgggatgctaactacaacatggttagaatcctaattagctactttaagatcctaggattggttggtttttcttttttttttctctttgtttctttccttttttttttttttttttaagacaacagaattcttaatagatttgaatagcgacgtatttcctgttgtagtcatttttagctcgaccacatcatcaggtctttgccaccgaggcatagtgtagaacagtcccggtcagttggccaacctcccgcagccaagtaggttcatccttgttcctgttcattctcatagatggccctgctttccccagggtgacatcgtagccaaatgtttactgttttcattgccttttatggccttgacgacttcccctcccaccagctgagaatgtatggaggtcatcggggcctcagctcggaggcagtgacttggggccaagggacctcgagacgctttccttccccaccccccagcgtcatctccccagcctgctgttcccgctttccatatagctttggccaggaaagcatgcaatagacttgctcggagcccagcactcctgggtctcggggtcggggaggggacgggggcacccacttccttgtctgtgacggcgtgttgttccccactctgggatggggaagaggcccgtcgggagttctgcatggcagttcactgcatgtgctgcccccttgggttgctctgccaatgtattaataccatcccatagctcctgccaaatcgagaccctctgacgacttgccgactaactggccaccacaagctgcagtctgtagcactgaacaaacaaaaaacaaaacgctcaagccttacgaccagagaaggatttcagcaaaccaccacctcccactcagtgtcccctccaaacttcacacttccctgcctgcagaggatgactctgttcacacccaatccagcgcggttctaccccacgaaactgtgactttccaaatgagcctttccctagggctagacctaagaccaggaagtttgagaaagcagccgcagctcaactcttccagctccgccagggttgggaagtccttaggtgcagtgcggctcccactgggtctgcggaccctcctattagagtacgaaattcctggcaactggtatagaaccaacctagaggctttgcagttggcaagctaactcgcggccttatttctgcctttaatctcccacaaggcatctgttgctttgggtcctccacgactcttaggcccgcctcaacaacccaggcacctcctaggtaggctcaaaggtagacccgtttccaccgcagcaggtgaacatgaccgtgttttcaactgtgtccacagttcagatccctttccagattgcaacctggcctgcatcccagctccttcctgctcgtgtcttaacctaagtgctttcttgtttgaaacgcctacaaacctccatgtggtagctcctttggcaaatgtcctgctgtggcgttttatgtgttgcttggagtctgtggggtcgtactccctcccctcccgtccccagggcagatttgattgaatgtttgctgaagttttgtctcttggtccacagtatttggaaaggtcactgaaaatgggtctttcagtcttggcatttcatttaggatctccatgagaaatgggcttcttgagccctgaaaatgtatattgtgtgtctcatctgtgaactgctttctgctatatagaactagctcaaaagactgtacatatttacaagaaactttatattcgtaaaaaaaaaaagaggaaattgaattggtttctacttttttattgtaaaaggtgcatttttcaacacttacttttggtttcaatggtggtagttgtggacagccatcttcactggagggtggggagctccgtgtgaccaccaagatgccagcaggatataccgtaacacgaaattgctgtcaaaagcttattagcatcaatcaagattctaggtctccaaaagtacaggctttttcttcattaccttttttattcagaacgaggaagagaacacaaggaatgattcaagatccaccttgagaggaatgaactttgttgttgaacaattagtgaaataaagcaatgatctaaact

SEQ ID NO: 2 - DNA, 5438 bp, Homo sapiens
cggcctgacaggcgggcatgcgggcggccagactgtagccgagcagcgaggctccggccgcagccatggagcggcggctgcgcgcgctggagcagctggcgcggggcgaggccggcggctgcccggggctcgacggcctcctagatctgctgctggcgctgcaccacgagctcagcagcggccccctacggcgggagcgcagcgtggcgcagttcctgagctgggccagccccttcgtatcaaaggtgaaagaactgcgtctgcagagagatgactttgagatcttgaaggtgatcggccgaggagcctttggggaggtcaccgtggtgaggcagagggacactgggcagatttttgccatgaaaatgctgcacaagtgggagatgctgaagagggctgagacagcctgtttccgggaggagcgggatgtgctcgtgaaaggggacagccgttgggtgaccactctgcactatgccttccaagacgaggagtacctgtaccttgtgatggactactatgctggtggggacctcctgacgctgctgagccgcttcgaggaccgtctcccgcccgagctggcccagttctacctggctgagatggtgctggccatccactcgctgcaccagctgggttatgtccacagggatgtcaagccagacaacgtcctgctggatgtgaacgggcacattcgcctggctgacttcggctcctgcctgcgtctcaacaccaacggcatggtggattcatcagtggcagtagggacgccggactatatctcccctgagatcctgcaggccatggaggagggcaagggccactacggcccacagtgtgactggtggtcgcttggagtctgcgcctatgagctgctctttggggagacgcccttctatgctgagtccttggtggaaacctacggcaagatcatgaaccacgaggaccacctgcagttccccccggacgtgcctgacgtgccagccagcgcccaagacctgatccgccagctgctgtgtcgccaggaagagcggctaggccgtggtgggctggatgacttccggaaccatcctttcttcgaaggcgtggactgggagcggctggcgagcagcacggccccctatattcctgagctgcgggggcccatggacacctccaactttgatgtggatgacgacaccctcaaccatccagggaccctgccaccgccctcccacggggccttctccggccatcacctgccattcgtgggcttcacctacacctcaggcagtcacagtcctgagagcagctctgaggcttgggctgccctggagcggaagctccagtgtctggagcaggagaaggtggagctgagcaggaagcaccaagaggccctgcacgcccccacagaccatcgggagctggagcagctacggaaggaagtgcagactctgcgggacaggctgccagagatgctgagggacaaggcctcattgtcccagacggatgggcccccagctggtagcccaggtcaggacagtgacctacggcaggagcttgaccgacttcaccgggagctggccgagggtcgggcagggctgcaggctcaggagcaggagctctgcagggcccaggggcagcaggaggagctgcttcagaggctacaggaggcccaggagagagaggcggccacagctagccagacccgggccctgagctcccagctggaggaagcccgggctgcccagagggagctggaggcccaggtgtcctccctgagccggcaggtgacgcagctgcagggacagtgggagcaacgccttgaggagtcgtcccaggccaagaccatccacacagcctctgagaccaacgggatgggaccccctgagggtgggcctcaggaggcccaactgaggaaggaggtggccgccctgcgagagcagctggagcaggcccacagccacaggccgagtggtaaggaggaggctctgtgccagctgcaggaggaaaaccggaggctgagccgggagcaggagcggctagaagcagagctggcccaggagcaggagagcaagcagcggctggagggtgagcggcgggagacggagagcaactgggaggcccagctcgccgacatcctcagctgggtgaatgatgagaaggtctcaagaggctacctgcaggccctggccaccaagatggcagaggagctggagtccttgaggaacgtaggcacccagacgctccctgcccggccactgaagatggaggcctcggccaggctggagctgcagtcagcgctggaggccgagatccgcgccaagcagggcctgcaggagcggctgacacaggtgcaggaggcccagctgcaggctgagcgccgtctgcaggaggccgagaagcagagccaggccctgcaacaggagctcgccatgctgcgggaggagctgcgggcccgagggccagtggacaccaagccctcaaactccctgattcccttcctgtccttccggagctcagagaaggattctgccaaggaccctggcatctcaggagaggccacaaggcatggaggagagccagatctgaggccggagggccgacgcagcctgcgcatgggggctgtgttccccagagcacccactgccaacacagcctctacagaaggtcttcctgctaagggatggggcatggggccctgggaggccttgggtaatggctgtccccctccccagcccggctcacacacgctgcgcccccggagcttcccatccccgaccaagtgtctccgctgcacctcgctgatgctgggcctgggccgccagggcctgggttgtgatgcctgcggctacttttgtcacacaacctgtgccccacaggccccaccctgccccgtgccccctgacctcctccgcacagccctgggagtacaccccgaaacaggcacaggcactgcctatgagggctttctgtcggtgccgcggccctcaggtgtccggcggggctggcagcgcgtgtttgctgccctgagtgactcacgcctgctgctgtttgacgcccctgacctgaggctcagcccgcccagtggggccctcctgcaggtcctagatctgagggacccccagttctcggctacccctgtcctggcctctgatgttatccatgcccaatccagggacctgccacgcatctttagggtgacaacctcccagctggcagtgccgcccaccacgtgcactgtgctgctgctggcagagagcgagggggagcgggaacgctggctgcaggtgctgggtgagctgcagcggctgctgctggacgcgcggccaagaccccggcccgtgtacacactcaaggaggcttacgacaacgggctgccgctgctgcctcacacgctctgcgctgccatcctcgaccaggatcgacttgcgcttggcaccgaggaggggctctttgtcatccatctgcgcagcaacgacatcttccaggtgggggagtgccggcgcgtgcagcagctgaccttgagccccagtgcaggcctgctggtcgtgctgtgtggccgcggccccagcgtgcgtctctttgccctggcggagctggagaacatagaggtagcaggtgccaagatccccgagtctcgaggctgccaggtgctggcagctggaagcatcctgcaggcccgcaccccggtgctctgtgtagccgtcaagcgccaggtgctctgctaccagctgggcccgggccctgggccctggcagcgccgcatccgtgagctgcaggcacctgccactgtgcagagcctggggctgctgggagaccggctatgtgtgggcgccgccggtggctttgcactctacccgctgctcaacgaggctgcgccgttggcgctgggggccggtttggtgcctgaggagctgccaccatcccgcgggggcctgggtgaggcactgggtgccgtggagcttagcctcagcgagttcctgctactcttcaccactgctggcatctacgtggatggcgcaggccgcaagtctcgtggccacgagctgttgtggccagcagcgcccatgggctgggggtatgcggccccctacctgacagtgttcagcgagaactccatcgatgtgtttgacgtgaggagggcagaatgggtgcagaccgtgccgctcaagaaggtgcggcccctcaatccagagggctccctgttcctctacggcaccgagaaggtccgcctgacctacctcaggaaccagctggcagagaaggacgagttcgacatcccggacctcaccgacaacagccggcgccagctgttccgcaccaagagcaagcgccgcttctttttccgcgtgtcggaggagcagcagaagcagcagcgcagggagatgctgaaggacccttttgtgcgctccaagctcatctcgccgcctaccaacttcaaccacctagtacacgtgggccctgccaacgggcggcccggcgccagggacaagtccccgtcccagcccctccgcactgtcacccaacaggctcccgaagagaagggccgagttgcccgcggctccggcccacagcggccccacagcttctccgaggcgttgcggcgcccagcctccatgggcagcgaaggcctcggtggagacgcagaccccactggagcagtgaagaggaaaccctggacatccctgtccagcgagtctgtgtcctgcccccagggatcgctgagccctgcaacctccctaatgcaggtctcagaacggccccgaagcctccccctgtcccctgaattggagagctctccttgatgccctctgttagggcccaccccaatcccagggcagaaggacatgagggagcaaagagcttgaggaatgccatactccggctggtccgggacatggaaattcggactcagggaggacccgggctgggcaatgactgggagacttgcctgggttcccaggacttgggggtcctgactcccagccctcatcctgccttacccctctgttcccagccccagcctttctaagccattgggaatagaatggccccttttgttctggtgtccaggggtgattgtgccaaagctcttatttccagtgccaagcccccagaggcttgtaagagttgggatgagggatggagagggactgggtctctgggaacaggttggaggtcttatctgtggactgtctgactcccagctgaggccaagatggggcatgtccccgtctctgcttagcgtctgggtgagaaaaacaggctgtgatccagaagaagggaagatagagaaggagggaaaggatgtaggcgaaggaggtgagagacaggataggaggaaggaagtggaggaggaggtggtaggaattggaaggaggtagaagccgtgcagaggaagaggggagagggacgaaggaggagcgatgaagaagaggagggagacaaaaaaagggaag

SEQ ID NO: 3 - DNA, 5990 bp, Homo sapiens
gtaccccgccgcacagaggcggcctctgcctcggcatgaagtcccgcagggacaagctgcacatcccggcgctgaccctcgatctgtctccgagcagccagagcccgtccctgctgggtcccagcagcccctgcagcccctgtagcccctccttgggcctgcacccctggagctgccgcagcgggaaccgcaagagcttggtggtaggaacgccctccccgaccctctcccggcccctgtcgccattgtcggtcccaacggcaggcagcagccccttggatagtcctcggaatttctcggctgcctctgccctaaatttcccctttgcccggagggcagacggcagaagatggtccctcgcgtctctcccatcttccggctatggaaccaacacacccagctccaccctctcgtcaagctcatcctcccgggaacgtctccaccagcttcccttccagccgacgccggacgagctgcacttcctgtccaagcacttccgcagctcagagaatgtgcttgatgaggaaggcggccggtcaccccgcctccgaccccgctctcgcagtctcagcccgggccgtgcaacggggaccttcgacaatgagattgtcatgatgaatcacgtgtaccgggagaggttccccaaggccacagcacagatggagggccgtctgcaggagttcctgacggcctacgcgcccggcgcccggctggcgctggctgatggcgtcttgggcttcatccaccaccagatcgtcgagctggcccgagactgcttggccaagtctggcgagaacctcgtcacctcccgctacttcctagagatgcaggagaagctggagcggcttctgcaggatgcccatgagcgttcggacagtgaggaggtcagcttcatcgtccagcttgtccggaaactgctgatcatcatctcacggccagctcggctgctggagtgtctggagtttgaccctgaggaattttaccacctgctggaggcggctgagggccatgcgcgggagggccaaggcattaagactgaccttccacagtacatcattgggcagctgggcctggccaaggaccccctggaggagatggtgccactgagtcacctcgaagaagaacagcccccagcacctgagtccccagagagccgcgccctggtcggccagtcacggaggaagccatgcgaaagcgactttgagaccatcaaactcattagcaacggagcctatggggccgtctacctggtgcggcaccgtgacacacggcagcgctttgccatcaagaagatcaacaaacagaacttgatcctgcgtaaccagatccagcaggtctttgtggagcgtgacattctcacctttgccgagaacccctttgtggtcagcatgttctgctcctttgagacccggcgccacctatgtatggtcatggaatacgtggaaggcggcgactgcgccacgctcctgaagaacatgggcccgctgcccgtggacatggcccgcctgtacttcgccgagacggtgttggcgctggagtacctgcataactatggcatcgtgcaccgtgacctcaaaccagacaatctgctcatcacctcgcttggccacatcaagctcacggacttcggcctgtccaagatcggcctcatgagcatggccaccaacctctatgagggccacatcgagaaggacgcccgagagttcatcgacaagcaggtgtgtgggacgccggagtacatagcccccgaggtgatcttccgccagggctatgggaagccagtggactggtgggccatgggcgtcgtcctctatgagtttctggtgggctgcgtgcctttctttggagatacccccgaggaactcttcggtcaggtggtcagcgatgagatcatgtggccagagggagatgaggcccttccagcagacgcccaggacctcatcaccaggttgctccggcagagcccgctggaccgtctgggcactggtggcacccacgaagtgaagcagcacccctttttcctggccctggactgggcagggcttctccgacacaaagccgagttcgtgccccagctcgaagccgaggatgataccagctactttgacacacgttcggaacgttaccgccatctgggctccgaggacgacgagaccaatgatgaagaatcgtccacagagatcccccagttctcctcctgctcccaccggttcagcaaggtctacagcagctctgagttcctggccgtccagcccactcctaccttcgctgaaaggagcttcagtgaagaccgggaggaggggtgggagcgcagcgaagtggactatggccgccggctgagtgctgacatccggctgaggtcctggacatcctctggatcctcctgtcagtcatcttcgtcccagcccgagcggggtcccagcccatctctcctgaataccatcagcctggacacaatgcccaagtttgccttctcatcagaggatgagggggtaggcccaggccctgcaggccccaagaggcccgtcttcattctaggggagcctgaccccccaccagcggccaccccagtgatgcccaagccctcgagcctttctgccgacacagctgctctcagccacgcccgcctacggagcaatagcatcggcgcccgacactccacaccaaggcctctggatgccggccggggccgccgccttgggggcccaagagacccagcccctgagaagtccagagcctcctccagcggtggcagtggtggcggcagtgggggccgcgtgcccaagtcagcctctgtctctgccctgtccctcatcatcacggcagatgatggcagcggcggccccctcatgagccccctttccccgcgctctctgtcctcgaacccgtcgtcccgtgactcttcgccgagccgagacccgtcccccgtgtgtggcagcctgcggccccccatcgttatccacagctctggcaagaagtacggcttcagcctgcgggcgatccgcgtctacatgggtgatagcgacgtctacactgtgcaccacgtcgtctggagtgtggaggacggaagccccgcccaggaggcgggcctgcgggctggggacctcatcacccacatcaacggggagtcagtgctggggctggtgcacatggacgtcgtggagctgctgctgaagagcggcaacaagatatccctgcggaccacagccctggagaacacctccatcaaggtgggccccgcccggaagaatgtggccaagggccgcatggcacgcaggagcaagaggagccgtcggcgggagacccaggatcggcggaagtcacttttcaagaagatctccaagcagacctccgtgctgcacaccagccgcagcttctcctccggactccaccactcactgtcatccagtgagagcctccccggctcgcccacccacagcctctcccccagccccaccactccctgccgaagcccagcccctgatgtcccagcagataccactgcatccccacccagcgcatccccgagctccagcagccccgcctccccagctgctgctggccacacccgccccagctccctgcacggcctggctgccaagcttgggccaccccgccccaagactggccgccgcaagtccaccagcagcatcccgccctccccgctggcctgcccgcccatctccgcgcccccaccccgctcgccctcgcccctgcccgggcacccgcccgcacctgcccgatccccgcggctgcgccggggccagtcagctgacaagctgggcacaggggagcggctggatggggaggcggggcggcgcactcgtgggccagaggccgagctcgtggtcatgcggcggctgcacctgtccgagcgccgagactccttcaagaagcaggaggccgtgcaggaggttagcttcgatgagccgcaggaggaggccactgggctgcccacctcagtgccacagatcgccgtggagggcgaggaagccgtgccagtagctctcgggcccaccggaagagactgatcccctgccaggtctctccctggcatcaaagttacgcgttttcttgtgcaatgttttttccgtaaagtcatgcctggatggggactgagccaccagcctgacacccagaaggcgagaagccatctcggtccttgctggaaggtggagacatcgcttgtgttctggtgtcaatcagggggctggatggggcaagaatgggggacaagggtggctttgtaaatagcagcaaatccctgcaactaatttattactttttttttcttttttttttttttttttgagacagagtctcactctgttgccccggctggagtgcagcggcgtgatctcagctcactgcaacctccgcctcccaagttcaagcgattgtcctgcctcagcttcccaagtggctgggattacaggcgcccaccactatgcccagctaattttttgtatttttagtacagacggggtttcaccatgttggtcaggctggtctcgaactcctgacctcatgatttgcctgcctttgcctcccaaagtgctgggattacaggcgtgagccactgggcccagcctaatttattactttttataagcgatagccgtactgagccgccccctgaaggcggctgccaggtcttgccccaggcacctgggactctgtttgcaggccctgccctctgggctgagaaggatgcactttggacaagtcatctgtgtttgtgttttccagtttttctgtactttttaagtgttttgtgttacctggtctcattcccctccccacacctacccatttgaggggatggagttgaagtcacctggtcacctgtaccggcccagttcggctacaacctggagtgtccgtaaacaattcctctcacccacaaaacaatgtaatcccagcgatggactggattctgaaggccacttcccaccatcatagctgccatgcccaggcagtgcctgctctatatatagagtctgcctccaatcctgctggcttcagcctggagaagggatatgggagctggagctttgatggatgaataggtgttcaccggatctgggcagaggggtcatccgctccccaggtgggcactgataaaggaaggtacaggcctcacctggaactgccaaggcagcctccagaaatgctcggctgtctcggggcacgctccagtatgccagtcctgcgggattacgtccagctacttccagaaacactcagtgtcccctcccctcaggctctgccttggcctggccttgtccagtctaccctggacaagatgccgtgtgtttgaggcccagcagagtaagcccttggccgtgatgtgtctgaaacacctgttaggggttccctccatatgtcagagcctctctgggatgaagttcaagccagaaaacccagtcgaggctcaagtttgaatttcagcttcactgtgtggctctgggaaaatggctttcccactctgtgcctcagtttccttgtgtttacaagactaatcccattgactgtttattaagcacctactgtgtgccaagcgcttttacgtggcttctccctcagccagccttgagaaggctggaggtggtgtcatcacctccattttacagacaaagcagctgagaccccagcgaggggcggagacctgtcccacgatcacccagcaggagtcgtggcagaacggagcatcagccagaccctgttgtgggcgttgtcatcaagggagcttgaatggagggtctggtgtcagatacagccgactccagccccagctcatcccccatgatgctgtgtgacccactgggcactctggtgagggagctttccagacatcaacagcccactctgcttccctttctgagtcccctgtccagcactgcctagtgttggagggtagaccaaggctgtgcatgattcaccccctccttccatcctggagctggcagtgaataaaagcccgtatttac

SEQ ID NO: 4 - DNA, 5516 bp, Homo sapiens
atgaagcggagccgctgccgcgaccgaccgcagccgccgccgcccgaccgccgggaggatggagttcagcgggcagcggagctgtctcagtctttgccgccgcgccggcgagcgccgcccgggaggcagcggctggaggagcggacgggccccgcggggcccgagggcaaggagcaggatgtagtaactggagttagtcccctgctcttcaggaaactcagtaatcctgacatattttcatccactggaaaagttaaacttcagcgacaactgagtcaggatgattgtaagttatggagaggaaacctggccagctctctatcgggtaagcagctgctccctttgtccagcagtgtacatagcagtgtgggacaggtgacttggcagtcgtcaggagaagcatcaaacctggttcgaatgagaaaccagtcccttggacagtctgcaccttctcttactgctggcctgaaggagttgagccttccaagaagaggcagcttttgtcggacaagtaaccgcaagagcttgattgtgacctctagcacatcacctacactaccacggccacactcaccactccatggccacacaggtaacagtcctttggacagcccccggaatttctctccaaatgcacctgctcacttttcttttgttcctgcccgtaggactgatgggcggcgctggtctttggcctctttgccctcttcaggatatggaactaacactcctagctccactgtctcatcatcatgctcctcacaggaaaagctgcatcagttgcctttccagcctacagctgatgagctgcactttttgacgaagcatttcagcacagagagcgtaccagatgaggaaggacggcagtccccagccatgcggcctcgctcccggagcctcagtcccggacgatccccagtatcctttgacagtgaaataataatgatgaatcatgtttacaaagaaagattcccaaaggccaccgcacaaatggaagagcgactagcagagtttatttcctccaacactccagacagcgtgctgcccttggcagatggagccctgagctttattcatcatcaggtgattgagatggcccgagactgcctggataaatctcggagtggcctcattacatcacaatacttctacgaacttcaagagaatttggagaaacttttacaagatgctcatgagcgctcagagagctcagaagtggcttttgtgatgcagctggtgaaaaagctgatgattatcattgcccgcccagcacgtctcctggaatgcctggagtttgaccctgaagagttctaccaccttttagaagcagctgagggccacgccaaagagggacaagggattaaatgtgacattccccgctacatcgttagccagctgggcctcacccgggatcccctagaagaaatggcccagttgagcagctgtgacagtcctgacactccagagacagatgattctattgagggccatggggcatctctgccatctaaaaagacaccctctgaagaggacttcgagaccattaagctcatcagcaatggcgcctatggggctgtatttctggtgcggcacaagtccacccggcagcgctttgccatgaagaagatcaacaagcagaacctgatcctacggaaccagatccagcaggccttcgtggagcgtgacatactgactttcgctgagaacccctttgtggtcagcatgttctgctcctttgataccaagcgccacttgtgcatggtgatggagtacgttgaagggggagactgtgccactctgctgaagaatattggggccctgcctgtggacatggtgcgtctatactttgcggaaactgtgctggccctggagtacttacacaactatggcatcgtgcaccgtgacctcaagcctgacaacctcctaattacatccatggggcacatcaagctcacggactttggactgtccaaaattggcctcatgagtctgacaacgaacttgtatgagggtcatattgaaaaggatgcccgggaattcctggacaagcaggtatgcgggaccccagaatacattgcgcctgaggtgatcctgcgccagggctatgggaagccagtggactggtgggccatgggcattatcctgtatgagttcctggtgggctgcgtccctttttttggagatactccggaggagctctttgggcaggtgatcagtgatgagattgtgtggcctgagggtgatgaggcactgcccccagacgcccaggacctcacctccaaactgctccaccagaaccctctggagagacttggcacaggcagtgcctatgaggtgaagcagcacccattctttactggtctggactggacaggacttctccgccagaaggctgaatttattcctcagttggagtcagaggatgatactagctattttgacacccgctcagagcgataccaccacatggactcggaggatgaggaagaagtgagtgaggatggctgccttgagatccgccagttctcttcctgctctccaaggttcaacaaggtgtacagcagcatggagcggctctcactgctcgaggagcgccggacaccacccccgaccaagcgcagcttgagtgaggagaaggaggcccattcagatggcctggcagggctcaaaggccgagaccggagctgggtgattggctcccctgagatattacggaagcggctgtcggtgtctgagtcatcccacacagagagtgactcaagccctccaatgacagtgcgacgccgctgctcaggcctcctggatgcgcctcggttcccggagggccctgaggaggccagcagcaccctcaggaggcaaccacaggagggtatatgggtcctgacacccccatctggagagggggtatctgggcctgtcactgaacactcaggggagcagcggccaaagctggatgaggaagctgttggccggagcagtggttccagtccagctatggagacccgaggccgtgggacctcacagctggctgagggagccacagccaaggccatcagtgacctggctgtgcgtagggcccgccaccggctgctctctggggactcaacagagaagcgcactgctcgccctgtcaacaaagtgatcaagtccgcctcagccacagccctctcactcctcattccttcggaacaccacacctgctccccgttggccagccccatgtccccacattctcagtcgtccaacccatcatcccgggactcttctccaagcagggacttcttgccagcccttggcagcatgaggcctcccatcatcatccaccgagctggcaagaagtatggcttcaccctgcgggccattcgcgtctacatgggtgactccgatgtctacaccgtgcaccatatggtgtggcacgtggaggatggaggtccggccagtgaggcagggcttcgtcaaggtgacctcatcacccatgtcaatggggaacctgtgcatggcctggtgcacacggaggtggtagagctgatcctgaagagtggaaacaaggtggccatttcaacaactcccctggagaacacatccattaaagtggggccagctcggaagggcagctacaaggccaagatggcccgaaggagcaagaggagccgcggcaaggatgggcaagaaagcagaaaaaggagctccctgttccgcaagatcaccaagcaagcatccctgctccacaccagccgcagcctttcttcccttaaccgctccttgtcatcaggggagagtgggccaggctctcccacacacagccacagcctttccccccgatctcccactcaaggctaccgggtgacccccgatgctgtgcattcagtgggagggaattcatcacagagcagctcccccagctccagcgtgcccagttccccagccggctctgggcacacacggcccagctccctccacggtctggcacccaagctccaacgccagtaccgctctccacggcgcaagtcagcaggcagcatcccactgtcaccactggcccacaccccttctcccccacccccaacagcttcacctcagcggtccccatcgcccctgtctggccatgtagcccaggcctttcccacaaagcttcacttgtcacctcccctgggcaggcaactctcacggcccaagagtgcggagccaccccgttcaccactactcaagagggtgcagtcggctgagaaactggcagcagcacttgccgcctctgagaagaagctagccacttctcgcaagcacagccttgacctgccccactctgaactaaagaaggaactgccgcccagggaagtgagccctctggaggtagttggagccaggagtgtgctgtctggcaagggggccctgccagggaagggggtgctgcagcctgctccctcacgggccctaggcaccctccggcaggaccgagccgaacgacgggagtcgctgcagaagcaagaagccattcgtgaggtggactcctcagaggacgacaccgaggaagggcctgagaacagccagggtgcacaggagctgagcttggcacctcacccagaagtgagccagagtgtggcccctaaaggagcaggagagagtggggaagaggatcctttcccgtccagagaccctaggagcctgggcccaatggtcccaagcctattgacagggatcacactggggcctcccagaatggaaagtcccagtggtccccacaggaggctcgggagcccacaagccattgaggaggctgccagctcctcctcagcaggccccaacctaggtcagtctggagccacagaccccatccctcctgaaggttgctggaaggcccagcacctccacacccaggcactaacagcactttctcccagcacttcgggactcacccccaccagcagttgctctcctcccagctccacctctgggaagctgagcatgtggtcctggaaatcccttattgagggcccagacagggcatccccaagcagaaaggcaaccatggcaggtgggctagccaacctccaggatttggaaaacacaactccagcccagcctaagaacctgtctcccagggagcaggggaagacacagccacctagtgcccccagactggcccatccatcttatgaggatcccagccagggctggctatgggagtctgagtgtgcacaagcagtgaaagaggatccagccctgagcatcacccaagtgcctgatgcctcaggtgacagaaggcaggacgttccatgccgaggctgccccctcacccagaagtctgagcccagcctcaggaggggccaagaaccagggggccatcaaaagcatcgggatttggcattggttccagatgagcttttaaagcaaacatagcagttgtttgccatttcttgcactcagacctgtgtaatatatgctcctggaaaccatctttatgtcttttgcttgcttgttttccttcggtcaacccacatgtaactaggtcctgtgtt

SEQ ID NO: 5 - DNA, 3882 bp, Homo sapiens
gcgttctttcccgcggaagtagttgacatttacaaggagcagcgcccccaaaggtctttagctgttttttaaggggagaacagcctttaccctctttggactttttcttcgttttttttttttttggagacggagtttcgttctttcgcccaggctggcgtacagtggcgcgatctcggctcactgcaacctctgctccccgggttcaagcgattctcctgcctcagcctccggagtagctgggattacaggtgcccgccaccacgcccggctgatttcctcttaagactttctacagcttccttatgaaatcttctgactgggccttgagcaataaggtcttttgctacaatttagtgctcttttcctcacactaaatcgaaaactctccctgttggtcctgatctgtttcagtcaggcaaattacatcctgggaaaacgtcagatgacaggggaggccactcgcttcctgctcatccagtttcgacactttctgtgctttcattagcttccagacctcagccctggccctcgctttactgtacagtcagaactggtttctacgcctcgcgagggtgggaggtcgtgtatgggaggaggaccgcttcccaccagcctcgttgggaagccaggagaaatctcttcaaatcctgcgattcagagtcaagtcccagtcgtcctttttctggtcggcccagaactgtttgtgcctcctccctcatgaggaatgatgtcagtggggccgcggtcgccgcccacgaagagtgtaaggctgcgaagtcggggctttcccgacgccccctccgtccgcgtctgcgtaggggaggtgacgagggcggggcgcggcggcggggtgacgtcacggccgcgcgcggcgtgggcggagcctcactttgaacccagttggcgggagtggctgctcgcggaggggcagtgtctgcggggccgctgtaggctgtccagcgatggatcccaccgcgggaagcaagaaggagcctggaggaggcgcggcgactgaggagggcgtgaataggatcgcagtgccaaaaccgccctccattgaggaattcagcatagtgaagcccattagccggggcgccttcgggaaagtgtatctggggcagaaaggcggcaaattgtatgcagtaaaggttgttaaaaaagcagacatgatcaacaaaaatatgactcatcaggtccaagctgagagagatgcactggcactaagcaaaagcccattcattgtccatttgtattattcactgcagtctgcaaacaatgtctacttggtaatggaatatcttattgggggagatgtcaagtctctcctacatatatatggttattttgatgaagagatggctgtgaaatatatttctgaagtagcactggctctagactaccttcacagacatggaatcatccacagggacttgaaaccggacaatatgcttatttctaatgagggtcatattaaactgacggattttggcctttcaaaagttactttgaatagagatattaatatgatggatatccttacaacaccatcaatggcaaaacctagacaagattattcaagaaccccaggacaagtgttatcgcttatcagctcgttgggatttaacacaccaattgcagaaaaaaatcaagaccctgcaaacatcctttcagcctgtctgtctgaaacatcacagctttctcaaggactcgtatgccctatgtctgtagatcaaaaggacactacgccttattctagcaaattactaaaatcatgtcttgaaacagttgcctccaacccaggaatgcctgtgaagtgtctaacttctaatttactccagtctaggaaaaggctggccacatccagtgccagtagtcaatcccacaccttcatatccagtgtggaatcagaatgccacagcagtcccaaatgggaaaaagattgccaggaaagtgatgaagcattgggcccaacaatgatgagttggaatgcagttgaaaagttatgcgcaaaatctgcaaatgccattgagacgaaaggtttcaataaaaaggatctggagttagctctttctcccattcataacagcagtgcccttcccaccactggacgctcttgtgtaaaccttgctaaaaaatgcttctctggggaagtttcttgggaagcagtagaactggatgtaaataatataaatatggacactgacacaagtcagttaggtttccatcagtcaaatcagtgggctgtggattctggtgggatatctgaagagcaccttgggaaaagaagtttaaaaagaaattttgagttggttgactccagtccttgtaaaaaaattatacagaataaaaaaacttgtgtagagtataagcataacgaaatgacaaattgttatacaaatcaaaatacaggcttaacagttgaagtgcaggaccttaagctatcagtgcacaaaagtcaacaaaatgactgtgctaataaggagaacattgtcaattcttttactgataaacaacaaacaccagaaaaattacctataccaatgatagcaaaaaaccttatgtgtgaactcgatgaagactgtgaaaagaatagtaagagggactacttaagttctagttttctatgttctgatgatgatagagcttctaaaaatatttctatgaactctgattcatcttttcctggaatttctataatggaaagtccattagaaagtcagcccttagattcagatagaagcatcaaagaatcctcttttgaagaatcaaatattgaagatccacttattgtaacaccagattgccaagaaaagacctcaccaaaaggtgtcgagaaccctgctgtacaagagagtaaccaaaaaatgttaggtcctcctttggaggtgctgaaaacgttagcctctaaaagaaatgctgttgcttttcgaagttttaacagtcatattaatgcatccaataactcagaaccatccagaatgaacatgacttctttagatgcaatggatatttcgtgtgcctacagtggttcatatcccatggctataacccctactcaaaaaagaagatcctgtatgccacatcagaccccaaatcagatcaagtcgggaactccataccgaactccgaagagtgtgagaagaggggtggcccccgttgatgatgggcgaattctaggaaccccagactaccttgcacctgagctgttactaggcagggcccatggtcctgcggtagactggtgggcacttggagtttgcttgtttgaatttctaacaggaattccccctttcaatgatgaaacaccacaacaagtattccagaatattctgaaaagagatatcccttggccagaaggtgaagaaaagttatctgataatgctcaaagtgcagtagaaatacttttaaccattgatgatacaaagagagctggaatgaaagagctaaaacgtcatcctctcttcagtgatgtggactgggaaaatctgcagcatcagactatgcctttcatcccccagccagatgatgaaacagatacctcctattttgaagccaggaatactgctcagcacctgactgtatctggatttagtctgtagcacaaaaattttccttttagtctagccttgtgttatagaatgaacttgcataattatatactccttaatactagattgatctaagggggaaagatcattatttaacctagttcaatgtgcttttaatgtacgttacagctttcacagagttaaaaggctgaaaggaatatagtcagtaatttatcttaacctcaaaactgtatataaatcttcaaagcttttttcatttatttattttgtttattgcactttatgaaaactgaagcatcaataaaattag

SEQ ID NO: 6 - DNA, 2392 bp, Homo sapiens
gaattcggacggaggaggcagaatggccagtcgaggggcgcttaggcgtggcctttccccagggctgcctcgactcctgcacctgtcccgagggctggcctgagacgggactcccggttctcccgctgcgaagcaggccccccggggccggggcagcggcgccggcatgtcgtctggcaccatgaagttcaatggctatttgagggtccgcatcggtgaggcagtggggctgcagcccacccgctggtccctgcgccactcgctcttcaagaagggccaccagctgctggacccctatctgacggtgagcgtggaccaggtgcgcgtgggccagaccagcaccaagcagaagaccaacaaacccacgtacaacgaggagttttgcgctaacgtcaccgacggcggccacctcgagttggccgtcttccacgagacgcccctgggctacgaccacttcgtggccaactgcaccctgcagttccaggagctgctgcgcacgaccggcgcctcggacaccttcgagggttgggtggatctcgagccagaggggaaagtatttgtggtaataacccttaccgggagtttcactgaagctactctccagagagaccggatcttcaaacattttaccaggaagcgccaaagggctatgcgaaggcgagtccaccagatcaatggacacaagttcatggccacgtatctgaggcagcccacctactgctctcactgcagggagtttatctggggagtgtttgggaaacagggttatcagtgccaagtgtgcacctgtgtcgtccataaacgctgccatcatctaattgttacagcctgtacttgccaaaacaatattaacaaagtggattcaaagattgcagaacagaggttcgggatcaacatcccacacaagttcagcatccacaactacaaagtgccaacattctgcgatcactgtggctcactgctctggggaataatgcgacaaggacttcagtgtaaaatatgtaaaatgaatgtgcatattcgatgtcaagcgaacgtggcccctaactgtggggtaaatgcggtggaacttgccaagaccctggcagggatgggtctccaacccggaaatatttctccaacctcgaaactcgtttccagatcgaccctaagacgacagggaaaggagagcagcaaagaaggaaatgggattggggttaattcttccaaccgacttggtatcgacaactttgagttcatccgagtgttggggaaggggagttttgggaaggtgatgcttgcaagagtaaaagaaacaggagacctctatgctgtgaaggtgctgaagaaggacgtgattctgcaggatgatgatgtggaatgcaccatgaccgagaaaaggatcctgtctctggcccgcaatcaccccttcctcactcagttgttctgctgctttcagacccccgatcgtctgttttttgtgatggagtttgtgaatgggggtgacttgatgttccacattcagaagtctcgtcgttttgatgaagcacgagctcgcttctatgctgcagaaatcatttcggctctcatgttcctccatgataaaggaatcatctatagagatctgaaactggacaatgtcctgttggaccacgagggtcactgtaaactggcagacttcggaatgtgcaaggaggggatttgcaatggtgtcaccacggccacattctgtggcacgccagactatatcgctccagagatcctccaggaaatgctgtacgggcctgcagtagactggtgggcaatgggcgtgttgctctatgagatgctctgtggtcacgcgccttttgaggcagagaatgaagatgacctctttgaggccatactgaatgatgaggtggtctaccctacctggctccatgaagatgccacagggatcctaaaatctttcatgaccaagaaccccaccatgcgcttgggcagcctgactcagggaggcgagcacgccatcttgagacatcctttttttaaggaaatcgactgggcccagctgaaccatcgccaaatagaaccgcctttcagacccagaatcaaatcccgagaagatgtcagtaattttgaccctgacttcataaaggaagagccagttttaactccaattgatgagggacatcttccaatgattaaccaggatgagtttagaaacttttcctatgtgtctccagaattgcaaccatagccttatggggagtgagagagagggcacgagaacccaaaggaatagagattctccaggaatttcctctatcggaccttcccagcatcagccttagaacaagaaccttaccttcaaggagcaagtgaagaactctgtcgaaggatggaactttcagatatcaactatttagagtcc

SEQ ID NO: 7 - DNA, 1564 bp, Homo sapiens
aaaaaaagatattttaaatttgatgctcatttttgtgtgtgtgtgttgagtgcatgcattcaatctgtgtattcctccctcatcaacccagaacatcctgcagctgccactctgagggtggccccttccttcctctgccctgaagctgtatcacaaagatttctagtcctagtgtgactctggccccatgctgatgggtttctgcagactggaagaggcggggctcgtgtcacgcagcatcagggagaggaattgcttatataactgggacagcagatttagcagagagaggaggcagaggctgggaatgggagcagtaagctgtcggcaggggcagcacacccagcagggggaacacacccgggtggctgtccctcacaagggtggcaacatccggggtccctgggcccgaggctggaagagcctctggacaggtttgggaaccatcaggtcagatctggaagaactctgggaactacgggggcaccactatctgcaccaggaatccctaaagccagccccagtactggtagagaagcctctgccagagtggccagtgcctcagttcatcaacctctttctaccagagtttcccattaggcccattagggggcagcagcagctgaagattttaggcctcgtggctaaaggctcctttggaactgtcctcaaggtgctagattgcacccagaaagctgtatttgcagtgaaggtggtgcccaaggtaaaggtcctacagagggataccgtgaggcagtgcaaagaggaggttagcatccagcgacagatcaaccatccctttgtacacagcttgggggacagctggcagggaaaacggcaccttttcattatgtgtagctactgcagcacagatctgtactccctttggtcggctgttggctgctttcctgaggcttccatccgtctctttgctgccgagttggtgctggtactgtgttatctccatgacttgggcatcatgcatcgagatgtgaagatggagaatattcttctagatgaacgaggccatctgaaactgacagactttggtctgtcccgccacgtgccccagggagctcaagcctacactatctgtggcactcttcagtacatggccccagaggtcctaagtggaggaccttacaaccatgctgctgattggtggtccctgggtgtcttgcttttctctctggcgactggaaagtttccagtggctgcagagagagatcatgtggccatgttggcaagtgtgacccacagtgactctgagatcccagcttctcttaaccagggcctctcactcctgctccatgagctcttatgccagaaccccctccatcgtctacgttatctgcatcacttccaggtccaccctttctttcggggtgtggccttcgacccagagctcctacagaagcagccagtgaactttgtcacggagacacaagctacccagcccagttcagcggagaccatgccctttgacgactttgactgtgatctggagtccttcttgctctaccctatccctgcttgagcctctctactgtaaattggggcccgg

SEQ ID NO: 8 - DNA, 3813 bp, Homo sapiens
tgcggccagagcgggaaagagactcgtctttgcgtccgagttctggagccgccgcaccccgactcctggggccgcggcagcggctgcgaggggacgggcgtccgctgtctcctgggttcccctcgtagcgacccgcgggatcggaaaaaaaggagaagatggaggaggagggtggcagcagcggcggcgccgcggggaccagcgcggacggcggcgacggaggagagcagctcctcactgtcaagcacgagctgcggactgctaatttgacaggacatgctgagaaggtgggaatagaaaattttgagctcctgaaggtcctaggaactggagcttatggaaaagtatttctagttcgtaaaataagtggccatgatactggaaagctgtatgccatgaaagttttgaaaaaggcaacaatcgttcaaaaggccaaaaccacagagcatacaaggacagaacgacaagtcctggaacacattaggcagtcgccatttttggtaacattacattatgctttccagacagaaaccaaacttcatctcattttagattatataaatggtggtgaactttttactcatctttctcaaagagagcgtttcacagagcatgaggtgcagatttatgttggagagattgtgcttgccctcgaacatctccacaagttggggattatatatcgtgatattaagcttgagaatattctacttgattctaatggccatgtggtgctgacagattttggtctgagtaaggagtttgtggctgatgaaactgaaagagcatattccttttgtggaactattgaatacatggcaccagatattgtcagagggggagattcaggacatgacaaggcagttgactggtggagtttgggtgttctaatgtatgaattactaactggagcatctcctttcactgttgatggagaaaaaaattcccaagctgagatatctaggagaatattaaaaagtgagcctccatatccccaagaaatgagtgctttagcgaaagacctaattcagcgtcttttgatgaaagatcccaagaagagattgggatgtggtccacgtgatgcagatgaaatcaaagaacatctcttctttcagaaaataaattgggatgatttagccgccaaaaaagtgcctgcaccatttaagccagtcattcgagatgaattagatgtgagtaactttgcagaagagttcacagaaatggatcccacttattctcccgcagccctgccccagagttctgagaagctgtttcagggctattcctttgttgctccttccatcctattcaagcgtaatgcagctgtcatagaccctcttcagtttcacatgggagttgaacgtcctggagtgacaaatgttgccaggagtgcaatgatgaaggactctccattctatcaacactatgacctagatttgaaggacaaacccctgggagaaggtagtttttcaatttgtcgaaagtgtgtgcataaaaaaagtaaccaagcttttgcagtcaaaataatcagcaaaaggatggaagccaatactcaaaaggaaataacagctctgaaactctgtgaaggacaccccaatattgtgaagttgcatgaagtttttcatgatcagcttcacacgtttctagtgatggaacttctgaatggaggagaactgtttgagcgcattaagaaaaagaagcacttcagtgagacggaagccagctacatcatgaggaagcttgtttcagctgtaagccacatgcatgatgttggagtggtgcacagggatctgaaacctgagaatttattgttcaccgatgaaaatgacaatttggaaattaaaataattgattttggatttgcacggctaaagccaccggataatcagcccctgaagactccatgcttcacccttcattatgccgccccagagctcttgaatcagaacggctacgatgagtcctgtgacctgtggagcttgggcgtcattttgtacacaatgttgtcaggacaggttcccttccaatctcatgaccgaagtttgacgtgtaccagcgcggtggaaatcatgaagaaaattaaaaagggagatttctcctttgaaggagaagcctggaagaatgtatcccaagaggctaaagatttgatccaaggacttctcacagtagatccaaacaaaaggcttaaaatgtctggcttgaggtacaatgaatggctacaagatggaagtcagctgtcctccaatcctctgatgactccggatattctaggatcttccggagctgccgtgcatacctgtgtgaaagcaaccttccacgcctttaacaaatacaagagagaggggttttgccttcagaatgttgataaggcccctttggctaagagaagaaaaatgaaaaagactagcaccagtaccgagacgcgcagcagttccagtgagagttcccattcttcttcctctcattctcacggtaaaactacacccaccaagacactgcagcccagcaatcctgccgacagcaataacccggagaccctcttccagttctcggactcagtagcttaggcatggtaggagtgtatcagtgatccattgcacctttattccctcagcatatgcctgaggcgatcttttatgcttttaaaaatgtttcccgttggtctcattggaatctgcctcctaatgatttttttcaggaaaacctgtttggttatcctcattcaaaagcactggacagagaatgttactgtgaatagagcacatattactctttttagcaacctagcatgatgccaacaagactattcttgaaagagcaaaggttcctgtaaatttaattagggctagatttgagctgcttgtaagtcacaggttttccagatgtctgccaacaagaaatgactcatactgtgatgataccttttgctttgccttgtggacaatgtgggtttttgaaatttgcacccttcaaacaatgatttatcagagaaaggggtctgttttcaaaaaagattctgtaatgaattttatgtgtggcatatacttatttcttgagagaagattttaacttattgtttttattttatggttacatatgatgataacctgctattattaaactttttctaaaaagtgaaaaaaaaaaaaaaagatataagaactcaaggtcccatactctgtattcgggatccatctgagatgcatgctaagctatgtgtatgtttttaattttgcactgctctttcctggcaatttgttttaatggttattgcagaatattaaggtacatgtctctctgttttaagtaatattgcactttataaaaaagtatgaataaagcaaactattttataaagtgcactgtttaaagcatttgcactgtatttttgccatttattttcattttctactttaaatttgtcctcacattcctcttctactttgtatgcaacaagtagaatggggcatgttgtgtcatgtagtcagccacttatgcaccaatgtgaggaaaacctaaagggaaattaaactaaacactgtgcttcatatttgtacactgtgttgtactacagtgaggaatttcctcctgtagtcatatattatgtacataatattttagaatcatacctatgacttgtttggaaatttttctgttaaattttaaatccagaaagcatattttataaacttatgcagagcacttttattgctcaaaagttctgaattcatacagaaaacaagtactatgtgatgaaaacatttcattaaaagattgctgcatttaaaaatacaattaattcgttccctatgc

SEQ ID NO: 9 - DNA, 2051 bp, Homo sapiens
ctgccgctcccggccctgccggccggccatgccccgagttccggctgccgcgcgcacccagacccggcgatgaggagtggcgccgagcgcaggggcagcagcgccgcggcgtccccgggctcgccgccccccggccgcgcgcgccccgccggctccgacgcgccctcggccctgccgccgcccgctgctggccagccccgggcccgggactcgggcgatgtccgctcgcagccgcgccccctgtttcagtggagcaagtggaagaagaggatgggctcgtccatgtcggcggccaccgcgcggaggccggtgtttgacgacaaggaggacgtgaacttcgaccacttccagatccttcgggccattgggaagggcagctttggcaaggtgtgcattgtgcagaagcgggacacggagaagatgtacgccatgaagtacatgaacaagcagcagtgcatcgagcgcgacgaggtccgcaacgtcttccgggagctggagatcctgcaggagatcgagcacgtcttcctggtgaacctctggtactccttccaggacgaggaggacatgttcatggtcgtggacctgctactgggcggggacctgcgctaccacctgcagcagaacgtgcagttctccgaggacacggtgaggctgtacatctgcgagatggcactggctctggactacctgcgcggccagcacatcatccacagagatgtcaagcctgacaacattctcctggatgagagaggacatgcacacctgaccgacttcaacattgccaccatcatcaaggacggggagcgggcgacggcattagcaggcaccaagccgtacatggctccggagatcttccactcttttgtcaacggcgggaccggctactccttcgaggtggactggtggtcggtgggggtgatggcctatgagctgctgcgaggatggaggccctatgacatccactccagcaacgccgtggagtccctggtgcagctgttcagcaccgtgagcgtccagtatgtccccacgtggtccaaggagatggtggccttgctgcggaagctcctcactgtgaaccccgagcaccggctctccagcctccaggacgtgcaggcagccccggcgctggccggcgtgctgtgggaccacctgagcgagaagagggtggagccgggcttcgtgcccaacaaaggccgtctgcactgcgaccccacctttgagctggaggagatgatcctggagtccaggcccctgcacaagaagaagaagcgcctggccaagaacaagtcccgggacaacagcagggacagctcccagtccgagaatgactatcttcaagactgcctcgatgccatccagcaagacttcgtgatttttaacagagaaaagctgaagaggagccaggacctcccgagggagcctctccccgcccctgagtccagggatgctgcggagcctgtggaggacgaggcggaacgctccgccctgcccatgtgcggccccatttgcccctcggccgggagcggctaggccgggacgcccgtggtcctcaccccttgagctgctttggagactcggctgccagagggagggccatgggccgaggcctggcattcacgttcccacccagcctggctggcggtgcccacagtgccccggacacatttcacacctcaggctcgtggtggtgcaggggacaagaggctgtgggtgcaggggacacctgtggagggcatttcccgtgggcccccgagacccgcctagatggaggaagcgctgctgggcgccctcttaccgctcacggggagctggggccatggatgggacaggagtctttgtccctgctcagcccggaggctgtgcacggccctcgtcacaaggtgacccttgcagcacaggccgcgggtgccccaggctcggctcagttcttggaggtcaagggcatgggttggggtagtgggtggggaggtgaatgttttctagagattcaaactgctccagcaatttctgtatagttttcacctctgagaattacaatgtgagaaccgctc

SEQ ID NO: 10 - DNA, 3063 bp, Homo sapiens
cggcggtggtggcggccatgttgggagcagcaggtccggcggcggctgcctgtgtgccgggcgcggagcagtgccgctgagggcaggggaggagcgaggcaggcggccggctgcggcggcagagagtaggcggagcggcgcggcccggccgaaaggcggcacagcccagccgggggtcgggggggtgcggtccggagccgctcggagccggcgcggcctagcccgagcggcgcatccccgggctggcgtgagcggctgcccggcctccccgcacccccggccggggcccatgcggcgggtgctcctgctgtgagaagccccgcccggccgggctccgcgccttcccttccctcccttcctccaagcttctcggttccctcccccgagataccggcgccatgtccagcgctcggacccccctacccacgctgaacgagagggacacggagcagcccaccttgggacaccttgactccaagcccagcagtaagtccaacatgattcggggccgcaactcagccacctctgctgatgagcagccccacattggaaactaccggctcctcaagaccattggcaagggtaattttgccaaggtgaagttggcccgacacatcctgactgggaaagaggtagctgtgaagatcattgacaagactcaactgaactcctccagcctccagaaactattccgcgaagtaagaataatgaaggttttgaatcatcccaacatagttaaattatttgaagtgattgagactgagaaaacgctctaccttgtcatggagtacgctagtggcggagaggtatttgattacctagtggctcatggcaggatgaaagaaaaagaggctcgagccaaattccgccagatagtgtctgctgtgcagtactgtcaccagaagtttattgtccatagagacttaaaggcagaaaacctgctcttggatgctgatatgaacatcaagattgcagactttggcttcagcaatgaattcacctttgggaacaagctggacaccttctgtggcagtcccccttatgctgccccagaactcttccagggcaaaaaatatgatggacccgaggtggatgtgtggagcctaggagttatcctctatacactggtcagcggatccctgccttttgatggacagaacctcaaggagctgcgggaacgggtactgaggggaaaataccgtattccattctacatgtccacggactgtgaaaacctgcttaagaaatttctcattcttaatcccagcaagagaggcactttagagcaaatcatgaaagatcgatggatgaatgtgggtcacgaagatgatgaactaaagccttacgtggagccactccctgactacaaggacccccggcggacagagctgatggtgtccatgggttatacacgggaagagatccaggactcgctggtgggccagagatacaacgaggtgatggccacctatctgctcctgggctacaagagctccgagctggaaggcgacaccatcaccctgaaaccccggccttcagctgatctaaccaatagcagcgcccaattcccatcccacaaggtacagcgaagcgtgtcggccaatcccaagcagcggcgcttcagcgaccaggctggtcctgccattcccacctctaattcttactctaagaagactcagagtaacaacgcagaaaataagcggcctgaggaggaccgggagtcagggcggaaagccagcagcacagccaaggtgcctgccagccccctgcccggtctggagaggaagaagaccaccccaaccccctccacgaacagcgtcctctccaccagcacaaatcgaagcaggaattccccacttttggagcgggccagcctcggccaggcctccatccagaatggcaaagacagcctaaccatgccagggtcccgggcctccacggcttctgcttctgccgcagtctctgcggcccggccccgccagcaccagaaatccatgtcggcctccgtgcaccccaacaaggcctctgggctgccccccacggagagtaactgtgaggtgccgcggcccagcacagccccccagcgtgtccctgttgcctccccatccgcccacaacatcagcagcagtggtggagccccagaccgaactaacttcccccggggtgtgtccagccgaagcaccttccatgctgggcagctccgacaggtgcgggaccagcagaatttgccctacggtgtgaccccagcctctccctctggccacagccagggccggcggggggcctctgggagcatcttcagcaagttcacctccaagtttgtacgcagaaatctgtctttcaggtttgccagaaggaacctgaatgaacctgaaagcaaagaccgagtggagacgctcagacctcacgtggtgggcagtggcggcaacgacaaagaaaaggaagaatttcgggaggccaagccccgctccctccgcttcacgtggagtatgaagaccacgagctccatggagcccaacgagatgatgcgggagatccgcaaggtgctggacgcgaacagctgccagagcgagctgcatgagaagtacatgctgctgtgcatgcacggcacgccgggccacgaggacttcgtgcagtgggagatggaggtgtgcaaactgccgcggctctctctcaacggggttcgatttaagcggatatcgggcacctccatggccttcaaaaacattgcctccaaaatagccaacgagctgaagctttaacaggctgccaggagcgggggcggcgggggcgggccagctggacgggctgccggccgtgcgccgccccacctgggcgagactgcagcgatggattggtgtgtctccctgctggcacttctcccctccctggcccttctcagttttctcccacattcacccctgcccagagattcccccttctcctctcccctactggaggcaaaggaaggggagggtggatgggggggcagggctccccctcggtactgcggttgcacagagtatttcgcctaaaccaagaaattttttattaccaaaaaga

SEQ ID NO: 11 - DNA, 3463 bp, Homo sapiens
gggcgccggggggcgtgtccagggcctcgggctcagggcgtttataacaacttggaatgctgtgctttactgcgcgctctggtactgctgtggctccccgtcctggtgcgggacctgtgccccgcgcttcagccctccccgcacagcctattgattcccctgccgcccttgctcacctcctgctcgccatggagtcgctggttttcgcgcggcgctccggccccactccctcggccgcagagctagcccggccgctggcggaagggctgatcaagtcgcccaagcccctaatgaagaagcaggcggtgaagcggcaccaccacaagcacaacctgcggcaccgctacgagttcctggagaccctgggcaaaggcacctacgggaaggtgaagaaggcgcgggagagctcggggcgcctggtggccatcaagtcaatccggaaggacaaaatcaaagatgagcaagatctgatgcacatacggagggagattgagatcatgtcatcactcaaccaccctcacatcattgccatccatgaagtgtttgagaacagcagcaagatcgtgatcgtcatggagtatgccagccggggcgacctttatgactacatcagcgagcggcagcagctcagtgagcgcgaagctaggcatttcttccggcagatcgtctctgccgtgcactattgccatcagaacagagttgtccaccgagatctcaagctggagaacatcctcttggatgccaatgggaatatcaagattgctgacttcggcctctccaacctctaccatcaaggcaagttcctgcagacattctgtgggagccccctctatgcctcgccagagattgtcaatgggaagccctacacaggcccagaggtggacagctggtccctgggtgttctcctctacatcctggtgcatggcaccatgccctttgatgggcatgaccataagatcctagtgaaacagatcagcaacggggcctaccgggagccacctaaaccctctgatgcctgtggcctgatccggtggctgttgatggtgaaccccacccgccgggccaccctggaggatgtggccagtcactggtgggtcaactggggctacgccacccgagtgggagagcaggaggctccgcatgagggtgggcaccctggcagtgactctgcccgcgcctccatggctgactggctccggcgttcctcccgccccctcctggagaatggggccaaggtgtgcagcttcttcaagcagcatgcacctggtgggggaagcaccacccctggcctggagcgccagcattcgctcaagaagtcccgcaaggagaatgacatggcccagtctctccacagtgacacggctgatgacactgcccatcgccctggcaagagcaacctcaagctgccaaagggcattctcaagaagaaggtgtcagcctctgcagaaggggtacaggaggaccctccggagctcagcccaatccctgcgagcccagggcaggctgcccccctgctccccaagaagggcattctcaagaagccccgacagcgcgagtctggctactactcctctcccgagcccagtgaatctggggagctcttggacgcaggcgacgtgtttgtgagtggggatcccaaggagcagaagcctccgcaagcttcagggctgctcctccatcgcaaaggcatcctcaaactcaatggcaagttctcccagacagccttggagctcgcggcccccaccaccttcggctccctggatgaactcgccccacctcgccccctggcccgggccagccgaccctcaggggctgtgagcgaggacagcatcctgtcctctgagtcctttgaccagctggacttgcctgaacggctcccagagcccccactgcggggctgtgtgtctgtggacaacctcacggggcttgaggagcccccctcagagggccctggaagctgcctgaggcgctggcggcaggatcctttgggggacagctgcttttccctgacagactgccaggaggtgacagcgacctaccgacaggcactgagggtctgctcaaagctcacctgagtggagtaggcattgccccagcccggtcaggctctcagatgcagctggttgcaccccgaggggagatgccttctcccccacctcccaggacctgcatcccagctcagaaggctgagagggtttgcagtggagccctgagcagggctggatatgggaagtaggcaaatgaaatgcgccaagggttcagtgtctgtcttcagccctgctgaacgaagaggatactaaagagaggggaacgggaatgcccgcgacagagtccacattgcctgtttcttgtgtacatggaggggccacagagacctggaaagagaactctcccagggcccatctcctgcatcccatgaatactctgtacacatggtgccttctaaggacagctccttccctactcattccctgcccaagtggggccagacctctttacacacacattcccgttcctaccaaccaccagaactggatggtggcacccctaatgtgcatgaggcatcctgggaatggtctggagtaacgcttcgttatttttatttttatttttatttatttatttatttttttgagacggagtttcgctcttggtgcccaggctagagtgcaatggcgcgatctcagctcacctcaacctccgcctcccgggttcaagcgattctcctgcctcagcctccctagtagctgggattacaggcgcccgctaccatgcccggctaattttgtatttttagtagagacagggtttctccatgttggtcaggctggtctcaaactcccgacctcaggtgatccacccacctcggcctcccaaagtgctgggattacaggcgtgagccaccgcgccccacctaacccttccttatttagcctaggagtaagagaacacaatctctgtttcttcaatggttctcttcccttttccatcctccaaacctggcctgagcctcctgaagttgctgctgtgaatctgaaagacttgaaaagcctccgcctgctgtgtggacttcatctcaaggggcccagcctcctctggactccaccttggacctcagtgactcagaacttctgcctctaagctgctctaaagtccagactatggatgtgttctctaggccttcaggactctagaatgtccatatttatttttatgttcttggctttgtgttttaggaaaagtgaatcttgctgttttcaataatgtgaatgctatgttctgggaaaatccactatgacatctaagttttgtgtacagagagatatttttgcaactatttccacctcctcccacaaccccccacactccactccacactcttgagtctctttacctaatggtctctacctaatggacctccgtggccaaaaagtaccattaaaaccagaaaggtgattggaaa

SEQ ID NO: 12 - DNA, 3831 bp, Homo sapiens
tggccggcgctgggccccagagcgatgacatcgacggggaaggacggcggcgcgcagcacgcgcagtatgttgggccctaccggctggagaagacgctgggcaaggggcagacaggtctggtgaagctgggggttcactgcgtcacctgccagaaggtggccatcaagatcgtcaaccgtgagaagctcagcgagtcggtgctgatgaaggtggagcgggagatcgcgatcctgaagctcattgagcacccccacgtcctaaagctgcacgacgtttatgaaaacaaaaaatatttgtacctggtgctagaacacgtgtcaggtggtgagctcttcgactacctggtgaagaaggggaggctgacgcctaaggaggctcggaagttcttccggcagatcatctctgcgctggacttctgccacagccactccatatgccacagggatctgaaacctgaaaacctcctgctggacgagaagaacaacatccgcatcgcagactttggcatggcgtccctgcaggttggcgacagcctgttggagaccagctgtgggtccccccactacgcctgccccgaggtgatccggggggagaagtatgacggccggaaggcggacgtgtggagctgcggcgtcatcctgttcgccttgctggtgggggctctgcccttcgacgatgacaacttgcgacagctgctggagaaggtgaagcggggcgtgttccacatgccgcactttatcccgcccgactgccagagtctgctacggggcatgatcgaggtggacgccgcacgccgcctcacgctagagcacattcagaaacacatatggtatatagggggcaagaatgagcccgaaccagagcagcccattcctcgcaaggtgcagatccgctcgctgcccagcctggaggacatcgaccccgacgtgctggacagcatgcactcactgggctgcttccgagaccgcaacaagctgctgcaggacctgctgtccgaggaggagaaccaggagaagatgatttacttcctcctcctggaccggaaagaaaggtacccgagccaggaggatgaggacctgcccccccggaacgagatagaccctccccggaagcgtgtggactccccgatgctgaaccggcacggcaagcggcggccagaacgcaaatccatggaggtgctcagcgtgacggacggcggctccccggtgcctgcgcggcgggccattgagatggcccagcacggccagaggtctcggtccatcagcggtgcctcctcaggcctttccaccagcccactcagcagcccccgggtgacccctcacccctcaccaaggggcagtcccctccccacccccaaggggacacctgtccacacgccaaaggagagcccggctggcacgcccaaccccacgcccccgtccagccccagcgtcggaggggtgccctggagggcgcggctcaactccatcaagaacagctttctgggctcaccccgcttccaccgccggaaactgcaagttccgacgccggaggagatgtccaacctgacaccagagtcgtccccagagctggcgaagaagtcctggtttgggaacttcatcagcctggagaaggaggagcagatcttcgtggtcatcaaagacaaacctctgagctccatcaaggctgacatcgtgcacgccttcctgtcgattcccagtctcagccacagcgtcatctcccaaacgagcttccgggccgagtacaaggccacgggggggccagccgtgttccagaagccggtcaagttccaggttgatatcacctacacggagggtggggaggcgcagaaggagaacggcatctactccgtcaccttcaccctgctctcaggccccagccgtcgcttcaagagggtggtggagaccatccaggcccagctgctgagcacacacgacccgcctgcggcccagcacttgtcagaaccccccccaccagcgccaggactaagctggggtgctgggcttaagggccagaaggtggccaccagctacgagagtagcctctgacgctggcagacaccactaactgtatggaaatgatgacggggcggctttccaaatgtggaattatcccgaaaagttaacatgtcacctccacgaggccatcctctgtgaccgaaggcagctgctgcggacccgccctccctccgctcctgctgttgctgccgggcagtgaggcccagcccagcgccccgtccaccccgcggcagctcctcgcctcagctccgcacggcccgtgggaggaaggccaggctcgggggagcctcctccagcccggccgacccggactcccggtcacctgacccctcagcaagaacagcctgcctggtggccttctggggccaggacccccggtgggcaacgtagccacaggaacaggccccgtccaccgcctccacgccgcacctggaggcctcctcgcaggcccgtgccccgccctccctggccgcgccggcctccgtgtagtcttggcctcctcaggctgcctcccgtcctctcgtctcacccgcgcctcccttgcctcatctggggcggctgtgggctctggcgctcctctctggctgaggtggaaacagagacaccctgtggcaccagagccttcccagcaggccaggccgctgggctgggatcagtgttatttatttgccgttttaatttatggattctccgcacctctgttcagggaagggcggcggccacatcccctgccgtctgcgcgtctcaggcagtgggggggctggggccagggcgccctctgaggacagagctggtggggcgcgggggggctggcgagctactgtaaactttaaagaattcctgcaagatatttttataaacttttttttcttggtggtttttggaaaagggtgtgggggtgggggcgccgctggggcagggccaggttttgtgttttagtcccttgctcctgcttctttctacacacacatctaaagacggtgcggctcgctctgtcatgggttccgtctctctctgtggagaagcagctccacctctgggggggctcggggcagaggggcggtgtctcgtagcgggcggcagcgccagcgcccctctgtcaggctggggcaatcttggttttgtgtccaaaggtgaaggggtaggaggagggccctcagctggccctccccacacacaggacggcaggggcactgtgaggcttttcttattaaaatgaaaaaattgaaaaaaaaggacaaagagtcggtggcgctcctctgcagggcgttctgtgcagagcgaggcccagggcgcagccctcagagggctgcaggcccaccctgcccagtgcccgccgccgtgcttcaccccagctccagcttctgtgttcccttccgcccatgtgcccagccctcccaggcgggcacagcccgggtgcggcggccgtggggggcggcgggtctgatgcatgcctctgccatggagtcgtctgtctgcttcggtgcctgcccctgcctcccacccacctcgtgtatagattttaacgcttctgttaacattagacctctgccacaggctgggatttctatacataagaacaaaagcaaacacctaggacagcaaacgccaggcggtacaggcgggaaggggctctccacggagatcgaggacacgaagcaaactgcctcttgcttgccttccccttttgtgcttcggacacacgcggactccagcaggcgccacggaaatgggcaagcccctgcagtgtacccctgtcataactgtgagcagctgcagctccggaacaataaatcccttccgcaaagacaa

SEQ ID NO: 13 - DNA, 3249 bp, Homo sapiens
ccgggacccggagaagatgtcttcgcggacggtgctggccccgggcaacgatcggaactcggacacgcatggcaccttgggcagtggccgctcctcggacaaaggcccgtcctggtccagccgctcactgggtgcccgttgccggaactccatcgcctcctgtcccgaggagcagccccacgtgggcaactaccgcctgctgaggaccattgggaagggcaactttgccaaagtcaagctggctcggcacatcctcactggtcgggaggttgccatcaagattatcgacaaaacccagctgaatcccagcagcctgcagaagctgttccgagaagtccgcatcatgaagggcctaaaccaccccaacatcgtgaagctctttgaggtgattgagactgagaagacgctgtacctggtgatggagtacgcaagtgctggagaagtgtttgactacctcgtgtcgcatggccgcatgaaggagaaggaagctcgagccaagttccgacagattgtttcggctgtgcactattgtcaccagaaaaatattgtacacagggacctgcaggctgagaacctcttgctggatgccgaggccaacatcaagattgctgactttggcttcagcaacgagttcacgctgggatcgaagctggacacgttctgcgggagccccccatatgccgccccggagctgtttcagggcaagaagtacgacgggccggaggtggacatctggagcctgggagtcatcctgtacaccctcgtcagcggctccctgcccttcgacgggcacaacctcaaggagctgcgggagcgagtactcagagggaagtaccgggtccctttctacatgtcaacagactgtgagagcatcctgcggagatttttggtgctgaacccagctaaacgctgtactctcgagcaaatcatgaaagacaaatggatcaacatcggctatgagggtgaggagttgaagccatacacagagcccgaggaggacttcggggacaccaagagaattgaggtgatggtgggtatgggctacacacgggaagaaatcaaagagtccttgaccagccagaagtacaacgaagtgaccgccacctacctcctgctgggcaggaagactgaggagggtggggaccggggcgccccagggctggccctggcacgggtgcgggcgcccagcgacaccaccaacggaacaagttccagcaaaggcaccagccacagcaaagggcagcggagttcctcttccacctaccaccgccagcgcaggcatagcgatttctgtggcccatcccctgcacccctgcaccccaaacgcagcccgacgagcacgggggaggcggagctgaaggaggagcggctgccaggccggaaggcgagctgcagcaccgcggggagtgggagtcgagggctgcccccctccagccccatggtcagcagcgcccacaaccccaacaaggcagagatcccagagcggcggaaggacagcacgagcacccccaacaacctccctcctagcatgatgacccgcagaaacacctacgtttgcacagaacgcccgggggctgagcgcccgtcactgttgccaaatgggaaagaaaacagctcaggcaccccacgggtgccccctgcctccccctccagtcacagcctggcacccccatcaggggagcggagccgcctggcacgcggttccaccatccgcagcaccttccatggtggccaggtccgggaccggcgggcagggggtgggggtggtgggggtgtgcagaatgggccccctgcctctcccacactggcccatgaggctgcacccctgcccgccgggcggccccgccccaccaccaacctcttcaccaagctgacctccaaactgacccgaagggtcgcagacgaacctgagagaatcgggggacctgaggtcacaagttgccatctaccttgggatcaaacggaaaccgccccccggctgctccgattcccctggagtgtgaagctgaccagctcgcgccctcctgaggccctgatggcagctctgcgccaggccacagcagccgcccgctgccgctgccgccagccacagccgttcctgctggcctgcctgcacgggggtgcgggcgggcccgagcccctgtcccacttcgaagtggaggtctgccagctgccccggccaggcttgcggggagttctcttccgccgtgtggcgggcaccgccctggccttccgcaccctcgtcacccgcatctccaacgacctcgagctctgagccaccacggtcccagggcccttactcttcctctcccttgtcgccttcacttctacaggaggggaaggggccagggaggggattctccctttatcatcacctcagtttccctgaattatatttgggggcaaagattgtcccctctgctgttctctggggccgctcagcacagaagaaggatgagggggctcagcggggggagctggcaccttcctggagcctccagccagtcctgtcctccctcgccctaccaagagggcacctgaggagactttggggacagggcaggggcagggagggaaactgaggaaatcttccattcctcccaacagctcaaaattaggccttgggcaggggcagggagagctgctgagcctaaagactggagaatctgggggactgggagtgggggtcagagaggcagattccttcccctcccgtcccctcacgctcaaacccccacttcctgccccaggctggcgcggggcactttgtacaaatccttgtaaataccccacaccctcccctctgcaaaggtctcttgaggagctgccgctgtcacctacggtttttaagttattacaccccgaccctcctcctgtcagccccctcacctgcagcctgttgcccaataaatttaggagagtccccccctccccaatgctgaccctaggattttccttccctgccctcacctgcaaatgagttaaagaagaggcgtgggaatccaggcagtggtttttcctttcggagcctcggttttctcatctgcagaatgggagcggtgggggtgggaaggtaaggatggtcgtggaagaaggcaggatggaactcggcctcatccccgaggccccagttcctatatcgggccccccattcatccactcacactcccagccaccatgttacactggactctaagccacttcttactccagtagtaaatttattcaataaacaatcattgacccatg

SEQ ID NO: 14 - DNA, 2827 bp, Homo sapiens
gcggccaactttgcctctcccggtcggctcccgagcgggacttgtgaggcgtggccgggtggaggaggcgcttgcgggggcgtggggctccccggcaggcgggaggcacggagcaagtcgcactggacaatgacctgggcagctcggcgctgcggacacttttagctgagggcgcgggcgggtcggctcctccgcggctcctcggccccacctgcgcggagagggcgggatgccagagccaggtgtcccggcgcgttaagggccctcgcagtcagacgtccctgcaccggcgctcgcacccttagtcggcccggaacgtctttttgcggacgccctcggagcagccgcgatggccagcaccaggagtatcgagctggagcactttgaggaacgggacaaaaggccgcggccggggtcgcggagaggggcccccagctcctccgggggcagcagcagctcgggccccaaggggaacgggctcatccccagtccggcgcacagtgcccactgcagcttctaccgcacgcggaccctgcaggccctcagctcggagaagaaggccaagaaggcgcgcttctaccggaacggggaccgctacttcaagggcctggtgtttgccatctccagcgaccgcttccggtccttcgatgcgctcctcatagagctcacccgctccctgtcggacaacgtgaacctgccccagggtgtccgcactatctacaccatcgacggcagccggaaggtcaccagcctggacgagctgctggaaggtgagagttacgtgtgtgcatccaatgaaccatttcgtaaagtcgattacaccaaaaatattaatccaaactggtctgtgaacatcaagggtgggacatcccgagcgctggctgctgcctcctctgtgaaaagtgaagtaaaagaaagtaaagatttcatcaaacccaagttagtgactgtgattcgaagtggagtgaagcctagaaaagccgtgcggatccttctgaataaaaagactgctcattcctttgaacaagtcttaacagatatcaccgaagccattaaactagactcaggagtcgtcaagaggctctgcaccctggatggaaagcaggttacttgtctgcaagacttttttggtgatgacgatgtttttattgcatgtggaccagaaaaatttcgttatgcccaagatgactttgtcctggatcatagtgaatgtcgtgtcctgaagtcatcttattctcgatcctcagctgttaagtattctggatccaaaagccctgggccctctcgacgcagcaaatcaccagcttcagttaatggaactcccagcagccaactttctactcctaaatctacgaaatcctccagttcctctccaactagtccaggaagtttcagaggattaaagcagatttctgctcatggcagatcttcttccaatgtaaacggtggacctgagcttgaccgttgcataagtcctgaaggtgtgaatggaaacagatgctctgaatcatcaactcttcttgagaaatacaaaattggaaaggtcattggtgatggcaattttgcagtagtcaaagagtgtatagacaggtccactggaaaggagtttgccctaaagattatagacaaagccaaatgttgtggaaaggaacacctgattgagaatgaagtgtcaatactgcgccgagtgaaacatcccaatatcattatgctggtcgaggagatggaaacagcaactgagctctttctggtgatggaattggtcaaaggtggagatctctttgatgcaattacttcgtcgaccaagtacactgagagagatggcagtgccatggtgtacaacttagccaatgccctcaggtatctccatggcctcagcatcgtgcacagagacatcaaaccagagaatctcttggtgtgtgaatatcctgatggaaccaagtctttgaaactgggagactttgggcttgcgactgtggtagaaggccctttatacacagtctgtggcacacccacttatgtggctccagaaatcattgctgaaactggctatggcctgaaggtggacatttgggcagctggtgtgatcacatacatacttctctgtggattcccaccattccgaagtgagaacaatctccaggaagatctcttcgaccagatcttggctgggaagctggagtttccggccccctactgggataacatcacggactctgccaaggaattaatcagtcaaatgcttcaggtaaatgttgaagctcggtgtaccgcgggacaaatcctgagtcacccctgggtgtcagatgatgcctcccaggagaataacatgcaagctgaggtgacaggtaaactaaaacagcactttaataatgcgctccccaaacagaacagcactaccaccggggtctccgtcatcatgaacacggctctagataaggaggggcagattttctgcagcaagcactgtcaagacagcggcaggcctgggatggagcccatctctccagttcctccctcagtggaggagatccctgtgcctggggaagcagtcccggcccccacccctccggaatctcccaccccccactgtcctcccgctgccccgggtggtgagcgggcaggaacctggcgccgccaccgagactgagcctcctgcagacgggcgaagccgcctgctgcagcccaggaagccagccctctgctcggcctcgccggcctccctgctgcaggcctccctctcttcaccgcctgcgcctgagttcgcgggtcctccgcaggccgcctgggaaccggagcctggcgtgccggagcctggcctggtgct

SEQ ID NO: 15 - DNA, 2186 bp, Homo sapiens
ctggctccgattggctgtggtacagcaggtgccgcgtccggattgatcaaagccaggtgggcggggctgtcgcccagggtgactctcccgggaggcgcgtgcccaggctcagtagcattggggctggcgcgcgcggcgaatctcaacgctgcgccgtctgcgggcgcttccgggccaccagtttctctgctttccaccctggcgccccccagccctggctccccagctgcgctgccccgggcgtccacgccctgcgggcttagcgggttcagtgggctcaatctgcgcagcgccacctccatgttgaccaagcctctacaggggcctcccgcgccccccgggacccccacgccgccgccaggaggcaaggatcgggaagcgttcgaggccgagtatcgactcggccccctcctgggtaaggggggctttggcaccgtcttcgcaggacaccgcctcacagatcgactccaggtggccatcaaagtgattccccggaatcgtgtgctgggctggtcccccttgtcagactcagtcacatgcccactcgaagtcgcactgctatggaaagtgggtgcaggtggtgggcaccctggcgtgatccgcctgcttgactggtttgagacacaggaaggcttcatgctggtcctcgagcggcctttgcccgcccaggatctctttgactatatcacagagaagggcccactgggtgaaggcccaagccgctgcttctttggccaagtagtggcagccatccagcactgccattcccgtggagttgtccatcgtgacatcaaggatgagaacatcctgatagacctacgccgtggctgtgccaaactcattgattttggttctggtgccctgcttcatgatgaaccctacactgactttgatgggacaagggtgtacagccccccagagtggatctctcgacaccagtaccatgcactcccggccactgtctggtcactgggcatcctcctctatgacatggtgtgtggggacattccctttgagagggaccaggagattctggaagctgagctccacttcccagcccatgtctccccagactgctgtgccctaatccgccggtgcctggcccccaaaccttcttcccgaccctcactggaagagatcctgctggacccctggatgcaaacaccagccgaggatgttacccctcaacccctccaaaggaggccctgcccctttggcctggtccttgctaccctaagcctggcctggcctggcctggcccccaatggtcagaagagccatcccatggccatgtcacagggatagatggacatttgttgacttggttttacaggtcattaccagtcattaaagtccagtattactaaggtaagggattgaggatcaggggttagaagacataaaccaagtttgcccagttcccttcccaatcctacaaaggagccttcctcccagaacctgtggtccctgattttggagggggaacttcttgcttctcattttgctaaggaagtttattttggtgaagttgttcccattttgagccccgggactcttattttgatgatgtgtcaccccacattggcacctcctactaccaccacacaaacttagttcatatgcttttacttgggcaagggtgctttccttccaataccccagtagcttttattttagtaaagggaccctttcccctagcctagggtcccatattgggtcaagctgcttacctgcctcagcccaggattttttattttgggggaggtaatgccctgttgttaccccaaggcttctttttttttttttttttttttgggtgaggggaccctactttgttatcccaagtgctcttattctggtgagaagaaccttaattccataatttgggaaggaatggaagatggacaccaccggacaccaccagacaataggatgggatggatggttttttgggggatgggctaggggaaataaggcttgctgtttgttttcctggggcgctccctccaattttgcagatttttgcaacctcctcctgagccgggattgtccaattactaaaatgtaaataatcacgtattgtggggaggggagttccaagtgtgccctccttttttttcctgcctggattatttaaaaagccatgtgtggaaacccactatttaataaaagtaatagaatcagaa

SEQ ID NO: 16 - DNA, 2405 bp, Homo sapiens
gcggaccgacgcgacacgccgtgcgcctaccgcggctgcgctacgaaaacgagtcccggagcggccccgcgcccgccgcacccggccctcgcccgcccgaagacaggcgccaagctgccccgccgtctccccagctagcgcccggccgccgccgcctcgcgggccccgggcggaagggggcggggtcccgattcgccccgcccccgcggagggatacgcggcgccgcggcccaaaacccccgggcgaggcggccggggcgggtgaggcgctccgcctgctgcgcgtctacgcggtccccgcgggccttccgggcccactgcgccgcgcggaccgcctcgggctcggacggccggtgtccccggcgcgccgctcgcccggatcggccgcggcttcggcgcctggggctcggggctccggggaggccgtcgcccgcgatgctgctctccaagttcggctccctggcgcacctctgcgggcccggcggcgtggaccacctcccggtgaagatcctgcagccagccaaggcggacaaggagagcttcgagaaggcgtaccaggtgggcgccgtgctgggtagcggcggcttcggcacggtctacgcgggtagccgcatcgccgacgggctcccggtggctgtgaagcacgtggtgaaggagcgggtgaccgagtggggcagcctgggcggcgcgaccgtgcccctggaggtggtgctgctgcgcaaggtgggcgcggcgggcggcgcgcgcggcgtcatccgcctgctggactggttcgagcggcccgacggcttcctgctggtgctggagcggcccgagccggcgcaggacctcttcgactttatcacggagcgcggcgccctggacgagccgctggcgcgccgcttcttcgcgcaggtgctggccgccgtgcgccactgccacagctgcggggtcgtgcaccgcgacattaaggacgaaaatctgcttgtggacctgcgctccggagagctcaagctcatcgacttcggttcgggtgcgctgctcaaggacacggtctacaccgacttcgacggcacccgagtgtacagccccccggagtggatccgctaccaccgctaccacgggcgctcggccaccgtgtggtcgctgggcgtgcttctctacgatatggtgtgtggggacatccccttcgagcaggacgaggagatcctccgaggccgcctgctcttccggaggagggtctctccagagtgccagcagctgatccggtggtgcctgtccctgcggccctcagagcggccgtcgctggatcagattgcggcccatccctggatgctgggggctgacgggggcgccccggagagctgtgacctgcggctgtgcaccctcgaccctgatgacgtggccagcaccacgtccagcagcgagagcttgtgaggagctgcacctgactgggagctaggggaccacctgccttggccagacctgggacgcccccagaccctgactttttcctgcgtgggccgtctcctcctgcggaagcagtgacctctgacccctggtgaccttcgctttgagtgccttttgaacgctggtcccgcgggacttggttttctcaagctctgtctgtccaaagacgctccggtcgaggtcccgcctgccctgggtggatacttgaaccccagacgcccctctgtgctgctgtgtccggaggcggccttcccatctgcctgcccacccggagctctttccgccggcgcagggtcccaagcccacctcccgccctcagtcctgcggtgtgcgtctgggcacgtcctgcacacacaatgcaagtcctggcctccgcgcccgcccgcccacgcgagccgtacccgccgccaactctgttatttatggtgtgaccccctggaggtgccctcggcccaccggggctatttattgtttaatttatttgttgaggttatttcctctgagcagtctgcctctcccaagccccaggggacagtggggaggcaggggagggggtggctgtggtccagggaccccaggccctgattcctgtgcctggcgtctgtcctggccccgcctgtcagaagatgaacatgtatagtggctaacttaaggggagtgggtgaccctgacacttccaggcactgtgcccagggtttgggttttaaattattgactttgtacagtctgcttgtgggctctgaaagctggggtggggccagagcctgagcgtttaatttattcagtacctgtgtttgtgtgaatgcggtgtgtgcaggcatcgcagatgggggttctttcagttcaaaagtgagatgtctggagatcatatttttttatacaggtatttcaattaaaatgtttttgtacatagtgaaaaaaaaaaaaaaaaaaaaaaaaaaaaaaaaaaactcgag

SEQ ID NO: 17 - DNA, 1710 bp, Homo sapiens
tttttttttgagacggagtctcgctctgtcgcccaggctggagtgcagtggcgggatctcggctcactgcaagctccgcctcctgggttcacgccattctcctgcctcagcctcccaagtagctgggactacaggcgcccaccactacgcccggctaattttttgtatttttagtagagacggggtttcaccgttttagccgggatggtctcgatctcctgacctcgtgatccgcccgcctcggcctcccaaagtgctgggattacaggcgtgagccaccgcgcccggccgcacttcattctcaagttttgtggccaacgatggataggaggtggattgtgatgtattcggaacatgggaccttgaggagttccgtaaccaaaaggagaaagtaacaacagccagtggagacaaaaagaactgcttctctttctttccccctccaagttcctagtggagggctgagtccagcatcccagactcgtgtgactatataggcaagcatttggggacctacttcactttgataccctagccttcagcagctcaaggtgttggcctttggataggaggcttccaagtagtaaagctccctgctctcagcaagcccaacaccatggggaagggagatgtcttagaggcagcaccaaccaccacagcctaccattccctcatggatgaatatggttatgaggtgggcaaggccattggccatggctcctatgggtcggtatatgaggctttctacacaaagcagaaggttatggtggcagtcaagatcatctcaaagaagaaggcctctgatgactatcttaacaagttcctgccccgtgaaatacaggtaatgaaagtcttgcggcacaagtacctcatcaacttctatcgggccattgagagcacatctcgagtatacatcattctggaactggctcagggtggtgatgtccttgaatggatccagcgctacggggcctgctctgagccccttgctggcaagtggttctcccagctgaccctgggcattgcctacctgcacagcaagagcatcgtgcaccgggacttaaagttggagaacctgttgctggacaagtgggagaatgtgaagatatcagactttggctttgccaagatggtgccttctaaccagcctgtgggttgtagcccttcttaccgccaagtgaactgcttttcccacctcagccagacttactgtggcagctttgcttacgcttgcccagagatcttacgaggcttgccctacaaccctttcctgtctgacacctggagcatgggcgtcatcctttacactctagtggtcgcccatctgccctttgatgacaccaatctcaaaaagctgctaagagagactcagaaggaggtcactttcccagctaaccataccatctcccaggagtgcaagaacctgatcctccagatgctacgccaagccactaagcgtgccaccattctggacatcatcaaggattcctgggtgctcaagttccagcctgagcaacccacccatgagatcaggctgcttgaggccatgtgccagctccacaacaccactaaacagcaccaatccttgcaaattacgacctgaaaatggctgagggagggggctaagagaggagcaaagcaggaggtcttgggctaaaaatcttttttaccaaaaataaatctaagtctgatttagtttcatcaaaaaaa

SEQ ID NO: 18 - DNA, 5946 bp, Homo sapiens
gcggcggcggcggcaggagggggagcaggtgctggcacaagagcagcggcttgggggagccggcagcagcagtaacagcagcagcagccgccgccgccgccgccagtaaacgcggaccgtaccccaggggactacccagccggccggccctggaagccgcgctcgggtcccgccgcagtcggcggtgggggatgggcaggcagtggcggtcccgcctgccgagggttaacccccgccggtcccggtcctgagctggaccagagccctcctccagaaacccctgcgtccgccacggcccaggttaaatggaaaccacccttgggaactggatgcctgtgtagctgttctaccatatcagtgtattgcaatgagtgggggaggagagcagctggatatcctgagtgttggaatcctagtgaaagaaagatggaaagtggtgagaaagattgggggtgggggctttggagaaatttacgatgccttggacatgctcaccagggaaaatgttgcactgaaggtggaatcagctcaacaaccaaaacaagttctgaaaatggaagttgctgttttgaaaaagctgcaagggaaagaccatgtttgtagatttattggctgtgggaggaatgatcgattcaactatgtggtcatgcagttgcagggtcggaatctggcagatcttcgccgtagccagtcccgaggcacattcaccattagtaccactctccggctgggtagacagattttggagtctattgaaagcattcattctgtgggattcttgcatcgagacatcaaaccgtcgaacttcgctatgggtcgctttcctagtacatgtaggaaatgttacatgcttgattttggcttggctcgacaatttaccaattcctgtggtgacgtcagaccacctcgagctgtggcaggttttcgagggacagttcgttatgcatcaatcaacgcacatcggaacagggaaatgggaagacatgatgacctttggtccttattctacatgttggtggagtttgtggttggtcagctgccctggagaaaaataaaggacaaggagcaagtaggctctattaaggagagatatgaccacaggctcatgttgaaacatctccctccagaattcagcatctttctagaccatatctcttctttggattattttacaaaaccagactaccagcttcttacatccgtgtttgacaatagcatcaagacttttggagtaattgagagtgacccttttgactgggagaagactggaaatgatggctccctaacaaccaccactacttctaccacccctcagttgcacactcgcttgacccctgctgcaattggaattgccaatgctactcccatccctggagacttgcttcgagaaaatacagatgaggtatttccagatgaacagcttagcgatggagaaaatggcatccctgttggtgtgtcaccagataaattgcctggatctctgggacacccccgtccccaggagaaggatgtttgggaagagatggatgccaacaaaaacaagataaagcttggaatttgtaaggctgctactgaagaggagaacagccatggccaggcaaatggtcttctcaatgctccaagccttgggtcaccaattcgtgtccgctcagagattactcagccagacagagatattccactggtgcgaaagttacgttccattcacagctttgagctggaaaaacgtctgaccctggagccaaagccagacactgacaagttccttgagacctgcctggagaaaatgcagaaagataccagtgcaggaaaagaatctattctccctgctctgctgcataagccttgcgttcctgctgtgtcccgtactgaccacatctggcactatgatgaagaatatcttccagatgcctccaagcctgcttctgccaacacccctgagcaggcagatggtggtggcagcaatggatttatagctgttaacctgagctcttgcaagcaagaaattgattccaaagaatgggtgattgtggacaaggagcaggaccttcaggattttaggacaaatgaggctgtaggacataaaacaactggaagtccttctgatgaggagcctgaagtacttcaagtcctggaggcatcacctcaagatgaaaagctccagttaggtccttgggcagaaaatgatcatttaaagaaggaaacctcaggtgtggtcttagcactttctgcagagggtcctcctactgctgcttcagaacaatatacagataggctggaactccagcctggagctgctagtcagtttattgcagcgacgcccacaagtctaatggaggcgcaggcagaaggaccccttacagcgattacaattcctagaccttctgtggcatctacacagtcaacttcaggaagctttcactgtggtcagcagccagagaagaaagatcttcagcccatggagcccactgtggaactttactctccaagggaaaacttctctggcttggttgtgacagagggtgaacctcctagtggaggaagcagaacagatttggggcttcagatagatcacattggtcatgacatgttacccaacattagagaaagtaacaaatctcaagacctgggaccaaaagaacttcctgatcataatagactggttgtgagagaatttgaaaatctccctggggaaactgaagagaaaagcatccttttagagtcagataatgaagatgagaagttaagtagagggcagcattgtattgagatctcctctctcccaggagatttggtaattgtggaaaaggatcactcagctactactgaacctcttgatgtgacaaaaacacagacttttagtgtggtgccaaatcaagacaaaaataatgagataatgaagcttctgacagttggaacttcagaaatttcttccagagacattgacccacatgttgaaggtcagataggccaagtggcagaaatgcaaaaaaataagatatctaaggatgatgacatcatgagtgaagacttgccaggtcatcaaggagacctctctacttttttgcaccaagagggcaagagagagaaaatcacccctagaaatggagaactatttcattgtgtttcagagaatgaacatggtgccccaacccggaaggatatggttaggtcatcctttgtaactagacacagccgaatccctgttttagcacaagagatagactcaactttggaatcatcctctccagtttctgcaaaagaaaagctcctccaaaagaaagcctatcagccagacctagtcaagcttctggtggaaaaaagacaattcaagtccttccttggcgacctctcaagtgcctctgataaattgctagaggagaaactagctactgttcctgctcccttttgtgaggaggaagtgctcactcccttttcaagactgacagtagattctcacctgagtaggtcagctgaagatagctttctgtcacccatcatctcccagtctagaaagagcaaaattccaaggccagtttcatgggtcaacacagatcaggtcaatagctcaacttcgtctcagttctttcctcggccaccaccaggaaagccacccacgaggcctggagtagaagccaggctacgcagatataaagtcctagggagtagtaactccgactcagaccttttctcccgcctggcccaaattcttcaaaatggatctcagaaaccccggagcactactcagtgcaagagtccaggatctcctcacaatccaaaaacaccacccaagagtccagttgtccctcgcaggagtcccagtgcctctcctcgaagctcatccttgcctcgcacgtctagttcctcaccatctagggctggacggccccaccatgaccagaggagttcgtccccacatctggggagaagcaagtcacctcccagccactcaggatcttcctcctccaggaggtcctgccaacaggagcattgcaaacccagcaagaatggcctgaaaggatccggcagcctccaccaccactcagccagcactaaaaccccccaagggaagagtaagccagccagtaaactcagcagataggagccaggctgcatctctttgaaaggtgtgagatcttcctcctaaacctgatgcatgtgtgtccctgtactttctatgtaaaaaaatcagtgttgatcttctcttgcaaaagaaagtaacatgatcaattatttataagaagacataatacatgataaggaattacctaaggcaggcagcaagtagattaggaatcaatgtctttgtacaagaaggaaaaatagagcaaaaatccaagggggagaaactcattaaaatgagctctcattttttaagctgcctttgaaacaaaagagttgaggataggagatagaatggaattttaggggggttgcctaatttttttaagcctcaattcaaagattatatagcaaaagtgaaacttcttgtttgatattttcattcaaaactttcccaccctgaagagtcattgatcagatattagattatataagaagtctgttgccagggagccagtattcatgtatatttggcttgtgtgtttatttcgtgtattgagaatgaacacctttactttgcctcattcctagtaccctccctggagttcagatttttttttaaaattttgtatgtctcgtctgattcaatctctctgcttttattttatggtcctagttgtactatcaaatccaattacttttttttaggtccccctgattttttttttttagagcaagagttcttaacatattacatttttattatgaaaaataagaaagttaggtaaaggaaagaaaagtctaactagagctattttgcaggctttagtgtttagggagagaaagaaagtgtgggttaatagccttcaagatagaagatgccctttcatctctgttaagtgtcctcctttagaaacttgagtagaaggaaaactgaccagagtagactgcttccttaagtcttctgggttccaactgtttgtaatatcagcatccaagatgatacgagggaagcacaatgctttggactgtgatttgagatttagaaataaattagatatattattgaggcttagaatcctcaaactttgtattttatacatttagccaataaggaattaatatctggggaaataaatttaggcaaatatttcttttttaatgttttattacctgcttctcctgtgttttagttcaacatttgggcttcttggcctgattttcatacaatctcaatttacgaagctgtaaagaggaagatatttgttctaatctcactcttctaataggaatcaggcaaatgaaagtctaccagacttttaaaatgggctgtttttatactctctaggtgttttgtgttgtaaagaccttattaaggtcaggtaaattggtctgcttgctgttgaaatttgccttctagcaaacatatgtgctttctgtttgaccttgtgtttgctgccaaacctaatacagttgaattgggaaacaaaaaaaaaagaaaggaatacatttcctccccaagtgaacatcttctaatgctgcatcaaagctgccctgaagctgcactgaacttctcttgttctctttatctgtgttgagctttttaaaaaaacaaactcaaaacactattgaggcatataacgtctcttataagaaatgtagcatagtgtggaatcttaatttctctccagtttcaaacactccagaggaatgcaatagataagacatacttgctgtttatctaaagcaactgtaatattggaagatcagtccttctgtattatattgtataatagttgctataacactacttgcatgtcttcatggtaaattatataaatatttataaatatatagagagacatatccttatatagagtcatt

SEQ ID NO: 19 - DNA, 3229 bp, Homo sapiens
cttcctcctcctcctcctcctcctcctccctcctccttccccaccttcctccactccctcccttcccctccccttctacctcctcctcggccagctcaggttgcagcttctctggggaactgctcacctttccggagcaggggaagctgccccgtgcccgggagggagcgggcgcaccgcggcccccaggacacgcgctgtgagtcccgcgggcggtgcgcctgggaggaagggggaggtcggaggagggggcaccgcggcgccgggtataaggagcaaaggacccggctgcccagtccctcatgatcatgaacaagatgaagaactttaagcgccgtttctccctgtcagtgccccgcactgagaccattgaagaatccttggctgaattcacggagcaattcaaccagctccacaaccggcggaatgagaacttgcagctcggtcctcttggcagagaccccccgcaggagtgcagcaccttctccccaacagacagcggggaggagccggggcagctctcccctggcgtgcagttccagcggcggcagaaccagcgccgcttctccatggaggtgagggcctctggagctctgccccggcaggtggcaggatgcacgcacaagggtgtgcacaggagggcagctgccttacagccagactttgacgtcagcaagaggctctctctgcccatggatatccgcctgccccaggaattcctacagaagctacagatggagagcccagatctgcccaagccgctcagccgcatgtcccgccgggcctccctgtcagacattggctttgggaaactggaaacatacgtgaaactggacaaactgggagagggcacctatgccacagtcttcaaagggcgcagcaaactgacggagaaccttgtggccctgaaagagatccggctggagcacgaggagggagcgccctgcactgccatccgagaggtgtctctgctgaagaacctgaagcacgccaatattgtgaccctgcatgacctcatccacacagatcggtccctcaccctggtgtttgagtacctggacagtgacctgaagcagtatctggaccactgtgggaacctcatgagcatgcacaacgtcaagattttcatgttccagctgctccggggcctcgcctactgtcaccaccgcaagatcctgcaccgggacctgaagccccagaacctgctcatcaacgagaggggggagctgaagctggccgactttggactggccagggccaagtcagtgcccacaaagacttactccaatgaggtggtgaccctgtggtacaggccccccgatgtgctgctgggatccacagagtactccacccccattgatatgtggggcgtgggctgcatccactacgagatggccacagggaggcccctcttcccgggctccacagtcaaggaggagctgcacctcatctttcgcctcctcgggacccccacagaagagacgtggcccggcgtgaccgccttctctgagttccgcacctacagcttcccctgctacctcccgcagccgctcatcaaccacgcgcccaggttggatacggatggcatccacctcctgagcagcctgctcctgtatgaatccaagagtcgcatgtcagcagaggctgccctgagtcactcctacttccggtctctgggagagcgtgtgcaccagcttgaagacactgcctccatcttctccctgaaggagatccagctccagaaggacccaggctaccgaggcttggccttccagcagccaggacgagggaagaacaggcggcagagcatcttctgagccacgcccaccttgctgtggccaagggacaagagatcacatggagcacaaattcgggtaggatggagcctgtgtggccctcggaggactgaagaacgagggctgacagccagcctggaagaccgcttggcagcccttctggccacggctgtttcttctttgtgcttcccgtgtgcctccccagtagccctcacctgcataccaacccctcctttacccacgttggggctggcataagctgcttccctgagaggacatgaggggggggcggtcctcgtaccctctcccaccctggtgtttgggcacctgcgtgggatgcacacggatgacagaatcaaggcgccaggatgggcactctgccctggatacaggctctaccctcctcccccaggacctgcctagtgccagtttggtagtccccctttctggccccttggagcccacacacgtttcatctttttcccctctgagagcaagaagagacatggcatgttctctgggaccctggaatcctaggtacccacatgtgtgccaaagcctaccccacctggcaggtgtcccacagcaacagaaggaatagtagtccccactctttccatcagccctaccctaccctcattccccgacaccctctggcttgaaccatggctgagcagtgccggcatacgctttgccggcatgcttggatgcccagctgtgtccagaggtggcctgggaccgccagttgcacgcctgccacctcagccagcccccgcccagctcatcagtctgaatggagttgccttaaattggcaggtggtaccgtactcactgcccttggagctgtgaccggctcctgcctgtccaccccttcccgaggtggctcctgcttaccttatcatcccagggctctgattagccaggcctggtcagggtcctggggacggcacccagatatgcagagtcaccctgacactggtgccgggctgacctcagctcccgaaggctcgcacagcatccctgtcctaccttcccagcccttgtggctctgtccacctgatcccaataccagcttcccccagcccctgccaccccagagggcggccacgacagggagaggtgtagatgccaccatctgagggagaggaacgtggaacaggagcaggctctgatgctgagaggcttgcctccgggggctggaagcctgggtggccggggcccctgaagaaggctcccctctgtatcccccaggtctcctcaacactgggctgatcctgaatggcacaggccaaggggaggccagcctcgcctttctacccaggccccctgccctgcccacctcaggcccccaccctccactcctccccacggtactgtgaacgtcgtgtgactcagtgcagagacagataatatatttaattcatgtacagaaa

SEQ ID NO: 20 - DNA, 2250 bp, Homo sapiens
gggaaaggttcaagtgcgggttttctccttgaacctacaagattatgggtcaagagctgtgtgcaaagactgtacagcctggatgcagctgctaccattgttcagagggaggcgaggcacacagctgtcggaggagtcagcctgagaccacggaggctgcgttcaagctaacagacctaaaagaagcatcatgttccatgacttcatttcaccccaggggacttcaagctgcccgtgcccagaagttcaagagtaaaaggccacggagtaacagtgattgttttcaggaagaggatctgaggcagggttttcagtggaggaagagcctcccttttggggcagcctcatcttacttgaacttggagaagctgggtgaaggctcttatgcgacagtttacaaggggattagcagaataaatggacaactagtggctttaaaagtcatcagcatgaatgcagaggaaggagtcccatttacagctatccgagaagcttctctcctgaagggtttgaaacatgccaatattgtgctcctgcatgacataatccacaccaaagagacactgacattcgtttttgaatacatgcacacagacctggcccagtatatgtctcagcatccaggagggcttcatcctcataatgtcagacttttcatgtttcaacttttgcggggcctggcgtacatccaccaccaacacgttcttcacagggacctgaaacctcagaacttactcatcagtcacctgggagagctcaaactggctgattttggtcttgcccgggccaagtccattcccagccagacatactcttcagaagtcgtgaccctctggtaccggccccctgatgctttgctgggagccactgaatattcctctgagctggacatatggggtgcaggctgcatctttattgaaatgttccagggtcaacctttgtttcctggggtttccaacatccttgaacagctggagaaaatctgggaggtgctgggagtccctacagaggatacttggccgggagtctccaagctacctaactacaatccagaatggttcccactgcctacgcctcgaagccttcatgttgtctggaacaggctgggcagggttcctgaagctgaagacctggcctcccagatgctaaaaggctttcccagagaccgcgtctccgcccaggaagcacttgttcatgattatttcagcgccctgccatctcagctgtaccagcttcctgatgaggagtctttgtttacagtttcaggagtgaggctaaagccagaaatgtgtgaccttttggcctcctaccagaaaggtcaccacccagcccagtttagcaaatgctggtgaaaagaaagggcgagatcaccaaggttcttccagggctgtatttctgcagtttcggttttcatttgcttcagcttactaagaagcttcaaatctaactccatactgaacaaggggctttatgtcctcacctatgacctggaatagtttaaatatggtgttcaaggcaatagtacataatagtggaagaaaattcagtggaaggttattgctattgtcatttgcatagaatttaagtgattgatttaaaaaaactggacataaactaagtctaagaagagggcttctgaataacttcattcattttggcatttgttaagagattcctgggctagaaggttgatttcccaaaaagacagataagagactgacaatttaaaagaatctggagacagagctggtgcttacagagacctgccactcctgtgttcacttacaatttctcccaacaaaaggatttctgtggcaaggagaaaactagcctaaagtttagaaaaagatggtttcttggataacattgttaacaaaaggacttcctgaggactatttattattattttgtagggggcacttcctccttcactaaactggattatcagaacgtattactgttaacaaaaggacttcctgaggactatttattattattttgtagggggcacttcctccttcactaaactggattatcagaacgtattaccacccaacccatattttagaagtttggatttggctgctgattagaaatgaatttcaggctatctcctcctactgaatcttaattgtctgtgatgatggcaacagtgatggggaatctaagcgctggtttgatggtggagatattgaataagtagttgggagcagagttccaaagatgtaatttaagccctgttgcaccacc

SEQ ID NO: 21 - DNA, 1906 bp, Homo sapiens
gcgggcgtcctggccgccatgtgcaccgtagtggaccctcgcattgtccggagatacctactcaggcggcagctcgggcagggggcctatggcattgtgtggaaggcagtggaccggaggactggtgaggtcgtggccatcaagaaaatctttgatgcttttagggataagacagatgcccaggacatgggcttccttcttgctccacccacccacacacctgtgtttctgtctcttcagagaacattccgggaaatcacgctcctccaggagtttggggaccatcccaacatcatcagcctccttgacgtgatccgggcagagaacgacagggacatttacctggtgtttgagtttatggacactgacctgaacgcagtcatccggaagggcggcctgctgcaggacgtccacgtgcgctccatcttctaccagctcctgcgggccacccggttcctccactcggggcacgttgtgcaccgggaccagaagccgtccaatgtgctcctggatgccaactgcacagtgaagctgtgtgactttggcctggcccgctccctgggcgacctccctgaggggcctgaggaccaggccgtgacagagtacgtggccacacgctggtaccgagcaccggaggtgctgctctcttcgcaccgatacacccttggggtggacatgtggagtctgggctgtatcctgggggagatgctgcgggggagacccctgttccccggcacgtccaccctccaccagctggagctgatcctggagaccatcccaccgccatctgaggaggacctcctggctctcggctcaggctgccgtgcctctgtgctgcaccagctggggtcccggccacgacagacgctggatgccctcctaccgccagacacctccccagaggccttggacctccttaggcgactcctggtgttcgccccggacaagcggttaagcgcgacccaggcactgcagcacccctacgtgcagaggttccactgccccagcgacgagtgggcacgagaggcagatgtgcggccccgggcacacgaaggggtccagctctctgtgcctgagtaccgcagccgcgtctatcagatgatcctggagtgtggaggcagcagcggcacctcgagagagaagggcccggagggtgtctccccaagccaggcacacctgcacaaacccagagccgaccctcagctgccttctaggacacctgtgcagggtcccagacccaggccccagagcagcccaggccatgaccctgccgagcacgagtccccccgtgcagccaagaacgttcccaggcagaactccgctcccctgctccaaactgctctcctagggaatggggaaaggccccctggggcgaaggaagcgccccccttgacactctcgctggtgaagccaagcgggaggggagctgcgccctccctgacctcccaggctgcggctcaggtggccaaccaggccctgatccggggtgactggaaccggggcggtggggtgagggtggccagcgtacaacaggtccctccccggcttcctccggaggcccggcccggccggaggatgttcagcacctctgccttgcagggtgcccaggggggtgccagggctttgcttggaggctactcccaagcctacgggactgtctgccactcggcactgggccacctgcccctgctggaggggcaccatgtgtgagccgccctactcccttcacctggccctctgttcctgccccagccccttccccagacccctctccagtctcctgcaccccttagccctccctgctttgcctggcccgttgaagttccagggagcttgcccgggtctcctcgggggagcagatgagggccctgcccccgccccactgacttcctccaataaagtcatc

SEQ ID NO: 22 - DNA, 1494 bp, Homo sapiens
aggggagagcggccacagccgctgccgcttccaccacagtgtgaagaaaacaggtctgaaacaaggtcttacccccaagctgcttctgaacacagtgactgccagatctccaaacatcaagtccagctttgtccgccaacctgtctgacatgtcgggacccgtgccaagcagggccagagtttacacagatgttaatacacacagacctcgagaatactgggattacgagtcacatgtggtggaatggggaaatcaagatgactaccagctggttcgaaaattaggccgaggtaaatacagtgaagtatttgaagccatcaacatcacaaataatgaaaaagttgttgttaaaattctcaagccagtaaaaaagaagaaaattaagcgtgaaataaagattttggagaatttgagaggaggtcccaacatcatcacactggcagacattgtaaaagaccctgtgtcacgaacccccgccttggtttttgaacacgtaaacaacacagacttcaagcaattgtaccagacgttcacagactatgatattcgattttacatgtatgagattctgaaggccctggattattgtcacagcatgggaattatgcacagagatgtcaagccccataatgtcatgattgatcatgagcacagaaagctacgactaatagactggggtttggctgagttttatcatcctggccaagaatataatgtccgagttgcttcccgatacttcaaaggtcctgagctacttgtagactatcagatgtacgattatagtttggatatgtggagtttgggttgtatgctggcaagtatgatctttcggaaggagccatttttccatggacgtgacaattatgatcagttggtgaggatagccaaggttctggggacagaagatttatatggctatattgacaaatacaacattgaattagatccacgtttcaatgatatcttgggcagacactctcgaaagcgatgggaacgctttgtccaccgtgaaaatcagcaccttgtcagccctgaggccttggatttcctggacaaactgctgcgatatgaccaccagtcacggcttactgcaagagaggccatggagcacccctatttctacactgttgtgaaggaccaggctcgaatgggttcatctagcatgccagggggcagtacacccgtcagcagcgccaatgtgatgtcagggatttcttcagtgccaaccccttcaccccttggacctctggcaggctcaccagtgattgctgctgccaacccccttgggatgcctgttccagctgccgctggcgctcagcagtaacggccctatctgtctcctgatgcctgagcagaggtgggggagtccaccctctccttgatgcagcttgcgcctggcggggaggggtgaaacacttcagaagcaacgtgtctgaaccgttgcttgtggatttatagtagttcagtcataaaaaaaaattataataggctga

SEQ ID NO: 23 - DNA, 2886 bp, Homo sapiens
atgaacacccctctgcagtctgcacatacacaccttaccctggtcgagttcatagcctacttggtgtctgactccccctttcctgctgcttcaaccttgtctctgcccacgtgcaactttgatccctgccccactaaactgggtgctggcacaatgcctcccgcagcggcgggcggtcagcgccggcctcatgcagctcctcccgccgcctatccgcaccggaacaaagtaagggccgcggaggctcgtacttcacgagcagtcaggcgcgagtacgaggcaggcgacgaagcttctggtcgacggggtcgtggggggagaatgaaaagcgtgcagaatgcaagagctgaccggggaatgtgggtcagagagaggcgggctgtggtgcgcggacaagaaaatacagttgtagtttttgcagcagctgcatccccggaatccgacttcctccaaatcgtgcttcgtgatattgccagagaaatggtaccagaatacaaatctgatcttcagcccaggactcaaatggatgctaaaaagccaaggaaatgtgatttgactcccttcctggttttgaaagcaagaaagaaacaaaagttcacctctgcgaagcacctctgggtacagcgcaaaggcaaaggtgtggaggatcatgctgattggcagggccaaatctgggtgggtgtggagggaaaatcagcagaagggcaaggccttaatctaacaggtgcatttaacagaagtccagaaaacaaagtatctccccaaggccctgcactgaatgcattagaaattgactccagctatctggacccccaggctcttgcccttcctcaaggatggcagggcctcctctttccacctctactagggacagagctggttggaagtaaactttcggttcagatccagaagccaccttccaatatcaagaactccagaatgacccaagtctttcataagaacaccagtgttacttcactcccctttgtggacaccaaggggaagaagaatacggtaagcttcccacacattagcaagaaagtcctgctgaagtcatccctgctgtatcaggtgagtgcagacggactggaccctgagaaggcaggtgaaagacctggttttagtccaaagccagttttagaaaggcccaggatagtggggaaaagcacagtagctgctgaagaggagaatcaagctcacaatcagatgccggcctcagagctcaaggcttcagaaatacctttccaccctagcattaaaacccaggatcccaaggcagaggagaagtcaccaaagaagcaaaaggtgactctgacagcggcagaggccctaaagctttttaagaaccagctgtctccatatgaacaaagtgaaatcctgggctacgcggagctgtggttcctgggtcttgaagccaagaagctcgacacggctcctgagaaatttagcaagacgagttttgatgatgagcatggcttctatctgaaggtcctgcatgatcacattgcctaccgctatgaagttctggagacaatcgggaaggggtcctttggacaggtggccaagtgcttggatcacaaaaacaatgagctggtggccctgaaaatcatcaggaacaagaagaggtttcaccagcaggccctgatggagctgaagatcctggaagctctcagaaagaaggacaaagacaacacctacaatgtggtgcatatgaaggactttttctactttcgcaatcacttctgcatcacctttgagctcctgggaatcaacttgtatgagttgatgaagaataacaactttcaaggcttcagtctgtccatagttcggcgcttcactctctctgttttgaagtgcttgcagatgctttcggtagagaaaatcattcactgtgatctcaagcccgaaaatatagtgctataccaaaagggccaagcctctgttaaagtcattgactttggatcaagctgttatgaacaccagaaagtatacacgtacatccaaagccggttctaccgatccccagaagtgatcctgggccacccctacgacgtggccattgacatgtggagcctgggctgcatcacggcggagttgtacacgggctaccccctgttccccggggagaatgaggtggagcagctggcctgcatcatggaggtgctgggtctgccgccagccggcttcattcagacagcctccaggagacagacattctttgattccaaaggttttcctaaaaatataaccaacaacagggggaaaaaaagatacccagattccaaggacctcacgatggtgctgaaaacctatgacaccagcttcctggactttctcagaaggtgtttggtatgggaaccttctcttcgcatgaccccggaccaggccctcaagcatgcttggattcatcagtctcggaacctcaagccacagcccaggccccagaccctgaggaaatccaattcctttttcccctctgagacaaggaaggacaaggttcaaggctgtcatcactcgagcagaaaagatgagatcaccaaagagactacagagaaaacaaaagatagccccacgaagcatgttcagcattcaggtgatcagcaggactgtctccagcacggagctgacactgttcagctgcctcaactggtagacgctcccaagaagtcagaggcagctgtcggggcggaggtgtccatgacctccccaggacagagcaaaaacttctccctcaagaacacaaacgttttaccccctattgtatgacctttgctgagggtatgtcctgctcctttccaccagtgatttgtattaagacagcacttatattgtacaatacttcagactgttttttttaaatacataaaactttatgttaaaaactct

SEQ ID NO: 24 - DNA, 8212 bp, Homo sapiens
ccggcggtagccccggacggcagcaggaggccgaggcgggagcgcgcggggctgaggcggcggcggcggcggcgggaaggggctgggtggtggagcgggagggaggctgaggaggctccccctgcgggacgggcgcggggacggctccggggggcgggggccggggcccgggccggctcgcgcggggggtatgatgacccggctgcggggccccagatctcgtctcctccgccgcctcctcacggcagccccagctcgcggctgagaaccagacacaccggcggtatggcatcacagctgcaagtgttttcgcccccatcagtgtcgtcgagtgccttctgcagtgcgaagaaactgaaaatagagccctctggctgggatgtttcaggacagagtagcaacgacaaatattatacccacagcaaaaccctcccagccacacaagggcaagccaactcctctcaccaggtagcaaatttcaacatccctgcttacgaccagggcctcctcctcccagctcctgcagtggagcatattgttgtaacagccgctgatagctcgggcagtgctgctacatcaaccttccaaagcagccagaccctgactcacagaagcaacgtttctttgcttgagccatatcaaaaatgtggattgaaacgaaaaagtgaggaagttgacagcaacggtagtgtgcagatcatagaagaacatccccctctcatgctgcaaaacaggactgtggtgggtgctgctgccacaaccaccactgtgaccacaaagagtagcagttccagcggagaaggggattaccagctggtccagcatgagatcctttgctctatgaccaatagctatgaagtcttggagttcctaggccgggggacatttggacaggtggctaagtgctggaagaggagcaccaaggaaattgtggctattaaaatcttgaagaaccacccctcctatgccagacaaggacagattgaagtgagcatcctttcccgcctaagcagtgaaaatgctgatgagtataatttggtccgttcatacgagtgctttcagcataagaatcacacctgccttgtttttgaaatgttggagcagaacttatatgattttctaaagcaaaacaaatttagcccactgccactcaagtacatcagaccaatcttgcagcaggtggccacagccttgatgaagctcaagagtcttggtctgatccacgctgaccttaagcctgaaaacatcatgctggttgatccagttcgccagccctaccgagtgaaggtcattgactttggttctgctagtcacgtttccaaagctgtgtgctcaacctacttacagtcacgttactacagagctcctgaaattattcttgggttaccattttgtgaagctattgatatgtggtcactgggctgtgtgatagctgagctgttcctgggatggcctctttatcctggtgcttcagaatatgatcagattcgttatatttcacaaacacaaggcttgccagctgaatatcttctcagtgccggaacaaaaacaaccaggtttttcaacagagatcctaatttggggtacccactgtggaggcttaagacacctgaagaacatgaactggagactggaataaaatcaaaagaagctcggaagtacatttttaattgcttagatgacatggctcaggtgaatatgtctacagacctggagggaacagacatgttggcagagaaggcagaccgaagagaatacattgatctgttaaagaaaatgctcacaattgatgcagataagagaattacccctctaaaaactcttaaccatcagtttgtgacaatgactcaccttttggattttccacatagcaatcatgttaagtcttgttttcagaacatggagatctgcaagcggagggttcacatgtatgatacagtgagtcagatcaagagtcccttcactacacatgttgccccaaatacaagcacaaatctaaccatgagcttcagcaatcagctcaatacagtgcacaatcaggccagtgttctagcttccagttctactgcagcagctgctactctttctctggctaattcagatgtctcactactaaactaccagtcagctttgtacccatcatctgctgcaccagttcctggagttgcccagcagggtgtttccttgcagcctggaaccacccagatttgcactcagacagatccattccaacagacatttatagtatgtccacctgcgtttcaaactggactacaagcaacaacaaagcattctggattccctgtgaggatggataatgctgtaccgattgtaccccaggcaccagctgctcagccactacagattcagtcaggagttctcacgcagggaagctgtacaccactaatggtagcaactctccaccctcaagtagccaccatcacaccgcagtatgcggtgccctttactctgagctgcgcagccggccggccggcgctggttgaacagactgccgctgtactgcaggcgtggcctggagggactcagcaaattctcctgccttcaacttggcaacagttgcctggggtagctctacacaactctgtccagcccacagcaatgattccagaggccatggggagtggacagcagctagctgactggaggaatgcccactctcatggcaaccagtacagcactatcatgcagcagccatccttgctgactaaccatgtgacattggccactgctcagcctctgaatgttggtgttgcccatgttgtcagacaacaacaatccagttccctcccttcgaagaagaataagcagtcagctccagtctcttccaagtcctctctagatgttctgccttcccaagtctattctctggttgggagcagtcccctccgcaccacatcttcttataattccttggtccctgtccaagatcagcatcagcccatcatcattccagatactcccagccctcctgtgagtgtcatcactatccgaagtgacactgatgaggaagaggacaacaaatacaagcccagtagctctggactgaagccaaggtctaatgtcatcagttatgtcactgtcaatgattctccagactctgactcttctttgagcagcccttattccactgataccctgagtgctctccgaggcaatagtggatccgttttggaggggcctggcagagttgtggcagatggcactggcacccgcactatcattgtgcctccactgaaaactcagcttggtgactgcactgtagcaacccaggcctcaggtctcctgagcaataagactaagccagtcgcttcagtgagtgggcagtcatctggatgctgtatcacccccacagggtatcgagctcaacgcggggggaccagtgcagcacaaccactcaatcttagccagaaccagcagtcatcggcggctccaacctcacaggagagaagcagcaacccagccccccgcaggcagcaggcgtttgtggcccctctctcccaagccccctacaccttccagcatggcagcccgctacactcgacagggcacccacaccttgccccggcccctgctcacctgccaagccaggctcatctgtatacgtatgctgccccgacttctgctgctgcactgggctcaaccagctccattgctcatcttttctccccacagggttcctcaaggcatgctgcagcctataccactcaccctagcactttggtgcaccaggtccctgtcagtgttgggcccagcctcctcacttctgccagcgtggcccctgctcagtaccaacaccagtttgccacccaatcctacattgggtcttcccgaggctcaacaatttacactggatacccgctgagtcctaccaagatcagccagtattcctacttatagttggtgagcatgagggaggaggaatcatggctaccttctcctggccctgcgttcttaatattgggctatggagagatcctcctttaccctcttgaaatttcttagccagcaacttgttctgcaggggcccactgaagcagaaggtttttctctgggggaacctgtctcagtgttgactgcattgttgtagtcttcccaaagtttgccctatttttaaattcattatttttgtgacagtaattttggtacttggaagagttcagatgcccatcttctgcagttaccaaggaagagagattgttctgaagttaccctctgaaaaatattttgtctctctgacttgatttctataaatgcttttaaaaacaagtgaagcccctctttatttcattttgtgttattgtgattgctggtcaggaaaaatgctgatagaaggagttgaaatctgatgacaaaaaaagaaaaattactttttgtttgtttataaactcagacttgcctattttattttaaaagcggcttacacaatctcccttttgtttattggacatttaaacttacagagtttcagttttgttttaatgtcatattatacttaatgggcaattgttatttttgcaaaactggttacgtattactctgtgttactattgagattctctcaattgctcctgtgtttgttataaagtagtgtttaaaaggcagctcaccatttgctggtaacttaatgtgagagaatccatatctgcgtgaaaacaccaagtattctttttaaatgaagcaccatgaattcttttttaaattattttttaaaagtctttctctctctgattcagcttaaatttttttatcgaaaaagccattaaggtggttattattacatggtggtggtggttttattatatgcaaaatctctgtctattatgagatactggcattgatgagctttgcctaaagattagtatgaattttcagtaatacacctctgttttgctcatctctcccttctgttttatgtgatttgtttggggagaaagctaaaaaaacctgaaaccagataagaacatttcttgtgtatagcttttatacttcaaagtagcttcctttgtatgccagcagcaaattgaatgctctcttattaagacttatataataagtgcatgtaggaattgcaaaaaatattttaaaaatttattactgaatttaaaaatattttagaagttttgtaatggtggtgttttaatattttacataattaaatatgtacatattgattagaaaaatataacaagcaatttttcctgctaacccaaaatgttatttgtaatcaaatgtgtagtgattacacttgaattgtgtacttagtgtgtatgtgatcctccagtgttatcccggagatggattgatgtctccattgtatttaaaccaaaatgaactgatacttgttggaatgtatgtgaactaattgcaattatattagagcatattactgtagtgctgaatgagcaggggcattgcctgcaaggagaggagacccttggaattgttttgcacaggtgtgtctggtgaggagtttttcagtgtgtgtctcttccttccctttcttcctccttcccttattgtagtgccttatatgataatgtagtggttaatagagtttacagtgagcttgccttaggatggaccagcaagcccccgtggaccctaagttgttcaccgggatttatcagaacaggattagtagctgtattgtgtaatgcattgttctcagtttccctgccaacattgaaaaataaaaacagcagcttttctcctttaccaccacctctacccctttccattttggattctcggctgagttctcacagaagcattttccccatgtggctctctcactgtgcgttgctaccttgcttctgtgagaattcaggaagcaggtgagaggagtcaagccaatattaaatatgcattcttttaaagtatgtgcaatcacttttagaatgaatttttttttccttttcccatgtggcagtccttcctgcacatagttgacattcctagtaaaatatttgcttgttgaaaaaaacatgttaacagatgtgtttataccaaagagcctgttgtattgcttaccatgtccccatactatgaggagaagttttgtggtgccgctggtgacaaggaactcacagaaaggtttcttagctggtgaagaatatagagaaggaaccaaagcctgttgagtcattgaggcttttgaggtttcttttttaacagcttgtatagtcttggggcccttcaagctgtgaaattgtccttgtactctcagctcctgcatggatctgggtcaagtagaaggtactggggatggggacattcctgcccataaaggatttggggaaagaagattaatcctaaaatacaggtgtgttccatcygaattgaaaatgatatatttgagatataattttaggactggttctgtgtagatagagatggtgtcaaggaggtgcaggatggagatgggagatttcatggagcctggtcagccagctctgtaccaggttgaacaccgaggagctgtcaaagtatttggagtttcttcattgtaaggagtaagggcttccaagatggggcaggtagtccgtacagcctaccaggaacatgttgtgttttctttattttttaaaatcattatattgagttgtgttttcagcactatattggtcaagatagccaagcagtttgtataatttctgtcactagtgtcatacagttttctggtcaacatgtgtgatctttgtgtctcctttttgccaagcacattctgattttcttgttggaacacaggtctagtttctaaaggacaaattttttgttccttgtcttttttctgtaagggacaagatttgttgtttttgtaagaaatgagatgcaggaaagaaaaccaaatcccattcctgcaccccagtccaataagcagataccacttaagataggagtctaaactccacagaaaaggataataccaagagcttgtattgttaccttagtcacttgcctagcagtgtgtggctttaaaaactagagatttttcagtcttagtctgcaaactggcatttccgattttccagcataaaaatccacctgtgtctgctgaatgtgtatgtatgtgctcactgtggctttagattctgtccctggggttagccctgtkggccctgacaggaagggaggaagcctggtgaatttagtgagcagctggcctgggtcacagtgacctgacctcaaaccagcttaaggctttaagtcctctctcagaacttggcatttccaacttcttcctttccgggtgagagaagaagcggagaagggttcagtgtagccactctgggctcatagggacacttggtcactccagagtttttaatagctcccaggaggtgatattattttcagtgctcagctgaaataccaaccccaggaataagaactccatttcaaacagttctggccattctgagcctgcttttgtgattgctcatccattgtcctccactagaggggctaagcttgactgcccttagccaggcaagcacagtaatgtgtgttttgttcagcattattatgcaaaaattcactagttgagatggtttgttttaggataggaaatgaaattgcctctcagtgacaggagtggcccgagcctgcttcctattttgattttttttttttttaactgatagatggtgcagcatgtctacatggttgtttgttgctaaactttatataatgtgtggtttcaattcagcttgaaaaataatctcactacatgtagcagtacattatatgtacattatatgtaatgttagtatttctgctttgaatccttgatattgcaatggaattcctactttattaaatgtatttgatatgctagttattgtgtgcgatttaaactttttttgctttctccctttttttggttgtgcgctttcttttacaacaagcctctagaaacagatagtttctgagaattactgagctatgtttgtaatgcagatgtacttagggagtatgtaaaataatcattttaacaaaagaaatagatatttaaaatttaatactaactatgggaaaagggtccattgtgtaaaacatagtttatctttggattcaatgtttgtctttggttttacaaagtagcttgtattttcagtattttctacataatatggtaaaatgtagagcaattgcaatgcatcaataaaatgggtaaattttctgacttaaa

SEQ ID NO: 25 - DNA, 3142 bp, Homo sapiens
gcacccagccaaaaataaatacattttctaatttggcctcaacatctcccccaagctgcttcttatccatgtccatttctcggggactgccccttcatcccagagccctaggcccgttcttagacagctcccgcctttccctcaaaccgtcggtctcacggctgcttctcctggccttttgagtgtctcatccattggcctcgccctctcctccccaacctctcccatctgtgccctgtcctggactctttccctggcttggggcttccactcttacccgctccaacctatcccttttcatacagtaactttctgacactcatatctgaccctgccctcccctgctcaaagcccttctgtggctccccagtgccctcagaacagaatccaaactccttagcctggcattcagggccttttacaacctcaccccacagtagccacagactgggacaggagttttctgaacacagacacacacacatcacatctcccaagctcaagaagcccacctttcctcactcctgccttatccccattcctgtatgcccaaggcccacgattagacccccctctgtcaacacttcacctgtttggtctttgcaagattccgccactgggcgggggagggggcccagcctggtaccccacccccactccagccagggctcaggtctccaacaacagaaccagagccactcaacagcgctggaacccattcggtggggcctggggcccctcatcccaagccaggagggtttctggggaggggtgcagcccctggcagactgacagtgtggcctgggggtttgggggtgccagggaagcaggggccaacctcataggaggagacacgagtgcggttctctttcccccactggggggcctgctgtgtcagcagccaggcgggaggcctgggcggcagagccagtggtacaggggcctgggcagggcggtgtctggcagcagcggcaccatgtccaccatccagtcggagactgactgctacgacatcatcgaggtcttgggcaaggggaccttcggggaggtagccaagggctggcggcggagcacgggcgagatggtggccatcaagatcctcaagaatgacgcctaccgcaaccgcatcatcaagaacgagctgaagctgctgcactgcatgcgaggcctagaccctgaagaggcccacgtcatccgcttccttgagttcttccatgacgccctcaagttctacctggtctttgagctgctggagcaaaaccttttcgagttccagaaggagaacaacttcgcgcccctccccgcccgccacatccgtacagtcaccctgcaggtgctcacagccctggcccggctcaaggagctggctatcatccacgctgatctcaagcctgagaacatcatgctggtggaccagacccgctgccccttcagggtcaaggtgattgacttcggatccgccagcattttcagcgaggtgcgctacgtgaaggagccatacatccagtcgcgcttctaccgggcccctgagatcctgctggggctgcccttctgcgagaaggtggacgtgtggtccctgggctgcgtcatggctgagctgcacctgggctggcctctctaccccggcaacaacgagtacgaccaggtgcgctacatctgcgaaacccagggcctgcccaagccacacctgttgcacgccgcctgcaaggcccaccacttcttcaagcgcaacccccaccctgacgctgccaacccctggcagctcaagtcctcggctgactacctggccgagacgaaggtgcgcccattggagcgccgcaagtatatgctcaagtcgttggaccagattgagacagtgaatggtggcagtgtggccagtcggctaaccttccctgaccgggaggcgctggcggagcacgccgacctcaagagcatggtggagctgatcaagcgcatgctgacctgggagtcacacgaacgcatcagccccagtgctgccctgcgccaccccttcgtgtccatgcagcagctgcgcagtgcccacgagaccacccactactaccagctctcgctgcgcagctaccgcctctcgctgcaagtggaggggaagccccccacgcccgtcgtggccgcagaagatgggaccccctactactgtctggctgaggagaaggaggctgcgggtatgggcagtgtggccggcagcagccccttcttccgagaggagaaggcaccaggtatgcaaagagccatcgaccagctggatgacctgagtctgcaggaggctgggcatgggctgtggggtgagacctgcaccaatgcggtctccgacatgatggtccccctcaaggcagccatcactggccaccatgtgcccgactcgggccctgagcccatcctggccttctacagcagccgcctggcaggccgccacaaggcccgcaagccacctgcgggttccaagtccgactccaacttcagcaacctcattcggctgagccaggtctcgcctgaggatgacaggccctgccggggcagcagctgggaggaaggagagcatctcggggcctctgctgagccactggccatcctgcagcgagatgaggatgggcccaacattgacaacatgaccatggaagctgagaggccagaccctgagctcttcgaccccagcagctgtcctggagaatggctgagtgagccagactgcaccctggagagcgtcaggggcccacgggctcaggggctcccaccccgccgctcccaccagcatggtccaccccggggggccaccagcttcctccagcatgtcaccgggcaccactgatggtgattccacccctgcccatcactgggggctgcgctagctgggctggcattccctcccaacctgaactgctcctcagagccatctcctgaacccacaaattattcttacagaaagatagttatccagaaattctcattccccgtctgcggtgcggtgcgtgcctgcacacctctcctaaacacagcagggctttggagtctggcccatgctccttggccagaaggacagcaggaaagggggctgcaccccgctggccctgcgctcgcccttggccctgctgcctctgtctatttcaatatagaactgttcagc

SEQ ID NO: 26 - DNA, 3895 bp, Homo sapiens
agccgggcagctgcagcggagccgcggagcgggcggcggggcccaggctgtgcgcttggggagcgcggaatgtgaggcttggcgggccgcagcacgctcggacgggccaggggcggcgacccctcgcggacgcccggctgcgcgccgggccggggacttgcccttgcacgctccctgcgccctccagctcgccggcgggaccatgaagaagttctctcggatgcccaagtcggagggcggcagcggcggcggagcggcgggtggcggggctggcggggccggggccggggccggctgcggctccggcggctcgtccgtgggggtccgggtgttcgcggtcggccgccaccaggtcaccctggaagagtcgctggccgaaggtggattctccacagttttcctcgtgcgtactcacggtggaatccgatgtgcattgaagcgaatgtatgtcaataacatgccagacctcaatgtttgtaaaagggaaattacaattatgaaagagctatctggtcacaaaaatattgtgggctatttggactgtgctgttaattcaattagtgataatgtatgggaagtccttatcttaatggaatattgtcgagctggacaggtagtgaatcaaatgaataagaagctacagacgggttttacagaaccagaagtgttacagatattctgtgatacctgtgaagctgttgcaaggttgcatcagtgtaagactccaataattcaccgggatctgaaggtagaaaatattttgttgaatgatggtgggaactatgtactttgtgactttggcagtgccactaataaatttcttaatcctcaaaaagatggagttaatgtagtagaagaagaaattaaaaagtatacaactctgtcatacagagcccctgaaatgatcaacctttatggagggaaacccatcaccaccaaggctgatatctgggcactgggatgtctactctataaactttgtttcttcactcttccttttggtgagagtcaggttgctatctgtgatggcaacttcaccatcccagacaattctcgttactcccgtaacatacattgcttaataaggttcatgcttgaaccagatccggaacatagacctgatatatttcaagtgtcatattttgcatttaaatttgccaaaaaggattgtccagtctccaacatcaataattcttctattccttcagctcttcctgaaccgatgactgctagtgaagcagctgctaggaaaagccaaataaaagccagaataacagataccattggaccaacagaaacctcaattgcaccaagacaaagaccaaaggccaactctgctactactgccactcccagtgtgctgaccattcaaagttcagcaacacctgttaaagtccttgctcctggtgaattcggtaaccatagaccaaaaggggcactaagacctggaaatggccctgaaattttattgggtcagggacctcctcagcagccgccacagcagcatagagtactccagcaactacagcagggagattggagattacagcaactccatttacagcatcgtcatcctcaccagcagcagcagcagcagcagcagcaacagcaacagcagcagcagcaacagcaacagcagcagcagcagcagcagcagcagcaccaccaccaccaccaccaccacctacttcaagatgcttatatgcagcagtatcaacatgcaacacagcagcaacagatgcttcaacaacaatttttaatgcattcggtatatcaaccacaaccttctgcatcacagtatcctacaatgatgccgcagtatcagcaggctttctttcaacagcagatgctagctcaacatcagccgtctcaacaacaggcatcacctgaatatcttacctcccctcaagagttctcaccagccttagtttcctacacttcatcacttccagctcaggttggaaccataatggactcctcctatagtgccaataggtcagttgctgataaagaggccattgcaaatttcacaaatcagaagaacatcagcaatccacctgatatgtcagggtggaatccttttggagaggataatttctctaagttaacagaagaggaactattggacagagaatttgaccttctaagatcaaataggctcgaggagagagcatcctcagataagaatgtagactcactttctgctccacataaccatcctccagaagatccttttggttctgttcctttcatttctcattcaggttctcctgaaaagaaagctgaacattcatctataaatcaagaaaatggcactgcaaaccctatcaagaacggtaaaacaagtccagcatctaaagatcagcggactggaaagaaaacctcagtacagggtcaagtgcaaaaggggaatgatgaatctgaaagtgattttgaatcagatcccccttctcctaagagcagtgaagaggaagagcaagatgatgaagaagttcttcagggggaacaaggagattttaatgatgatgatactgaaccagaaaatctgggtcataggcctctcctcatggattctgaagatgaggaagaagaggagaaacatagctctgattctgattatgagcaggctaaagcaaagtacagtgacatgagctctgtctacagagacagatctggcagtggaccaacccaagatcttaatacaatactcctcacctcagcccaattatcctctgatgttgcagtggagactcccaaacaggagtttgatgtatttggcgctgtccccttctttgcagtgcgtgctcaacagccccagcaagaaaagaatgaaaagaacctccctcaacacaggtttcctgctgcaggactggagcaggaggaatttgatgtattcacaaaggcgccttttagcaagaaggtgaatgtacaagaatgccatgcagtggggcctgaggcacatactatccctggttatcccaaaagtgtagatgtatttggctccactccatttcagcccttcctcacatcaacaagtaaaagtgaaagcaatgaggacctttttgggcttgtgccctttgatgaaataacggggagccagcagcaaaaagtcaaacagcgcagcttacagaaactgtcctctcgccaaaggcgcacaaagcaggatatgtccaaaagtaatgggaagcggcatcatggcacgccaactagcacaaagaagactttgaagcctacctatcgcactccagagagggctcgcaggcacaaaaaagtgggccgccgagactctcaaagtagcaatgaatttttaaccatctcagactccaaggagaacattagtgttgcactgactgatgggaaagatagggggaatgtcttacaacctgaggagagcctgttggaccccttcggtgccaagcccttccattctccagacctgtcatggcaccctccacatcagggcctgagcgacatccgtgctgatcacaatactgtcctgccagggcggccaagacaaaattcactacatgggtcattccatagtgcagatgtattgaaaatggatgattttggtgccgtgccctttacagaacttgtggtgcaaagcatcactccacatcagtcccaacagtcccaaccagtcgaattagacccatttggtgctgctccatttccttctaaacagtagatacttctgatggattctcggcattaactcctgtttcaaaaaagtgtgaacagttttatgaatttgaaagaaaatttggtagctctttatagcattcattcttaaagatcagtcagaataggtgatttctaaataaaccaaatagaagaatgaaaaaaaaaaaaaaaaaaaaaaaaaaaaaaaaaaaaaaaaaaaaaaaaaaaaaaa

SEQ ID NO: 27 - DNA, 3912 bp, Homo sapiens
gaagaattgtcggcattggcctggccagcgctggttggtggcctggaggaggatttgattggaaaaccaacggtgcagctggccgcggtgtccctgagaaaagtcagaaatggccaatgaagcttttgcttataaaaggaatgcgatgttaattctggggcattgatgttttacaatgcctgatcaagataaaaaggtgaagaccacagaaaaatcaactgataaacagcaagaaatcaccatcagggactattcagatcttaaaagacttcggtgccttttgaacgtccaatcaagcaaacaacagcttccagccattaacttcgatagtgcccaaaatagcatgacgaagtctgagcccgccatcagggcgggtggacacagagctcggggtcagtggcatgaatccacagaagctgttgaacttgaaaattttagtataaactacaagaatgagagaaatttcagcaaacatcctcagcgtaaactatttcaggagatctttaccgccttggtgaaaaatagactcataagcagagagtgggttaatcgagccccatctattcattttctgagagtgttaatctgtctgaggctactaatgagggatccatgttatcaggaaatactccatagcttgggtgggattgaaaacctagctcagtatatggagattgtagccaatgagtacctcggctatggagaagagcagcacactgtggacaagctggtcaacatgacatatatttttcaaaaacttgctgcagtcaaagatcaaagagaatgggtcaccacaagtggagcccacaagacattagtaaatttacttggtgcccgagatactaatgttctattgggttcccttctggctctggctagtttagcagaaagtcaagaatgtagggagaagataagtgaactcaacattgtagaaaatctgttgatgattttacatgaatatgacttgctttctaaaagactaacagcggagttgctgcgcctactttgtgcagagccccaggtgaaagagcaggtgaagctctatgaggggataccggtcctcctcagtctgctccactctgaccacttgaagctcctctggagcattgtctggattctggtacaggtttgtgaggaccctgagaccagcgtggaaattcgcatttggggaggcatcaaacagcttcttcatattttacaaggagacagaaattttgtttctgatcactcctccattggaagcctgtccagtgcaaatgctgcaggccgaatccagcagcttcatttatcagaagacttgagccctagggaaatacaagaaaatactttctcacttcaagcagcctgctgtgctgccctcactgagctggtgctcaatgacaccaatgcccaccaggtggttcaggaaaatggtgtatatacaatagcaaaattaattttaccaaataagcaaaagaatgcagcaaaaagtaatctattacagtgttatgctttcagagccttgagatttctcttcagtatggaaagaaacagaccactctttaaaagacttttccccacagacttgtttgagatcttcattgacatagggcattatgtacgtgatatcagtgcttatgaagaattggtatccaagctgaatttattagtggaggatgaactgaagcaaattgctgaaaatattgaaagcattaatcagaacaaagctcctttgaaatatataggcaactatgcaattttggatcatcttggaagtggagcttttggctgtgtttacaaggttagaaagcatagtggtcaaaatcttttagcaatgaaagaggtcaatttacataacccagcatttgggaaggataagaaagatcgagacagcagcgtaaggaatattgtttctgaattaacaataattaaagagcagctttatcatcccaacattgtacgttattacaaaacatttctggaaaatgataggttgtacatagttatggagctgatagaaggagccccgcttggagagcatttcagttctttgaaggaaaaacatcaccattttactgaagaaagactatggaaaatatttatacagctgtgcttagctcttcgatacttacacaaggagaagaggattgtccatagagatctgacaccaaacaacattatgttgggggataaggacaaagtaaccgttactgactttggcctggcaaagcaaaaacaagaaaacagtaaactcacctctgtggttggaacaatcctgtattcttgccccgaggtactgaagagtgagccgtatggggagaaggctgatgtctgggcagtaggctgcatcctttatcagatggcgactttgagtccccccttctacagcactaacatgctgtccttggctacaaaaatagtggaggcggtatatgaaccagtcccagaaggtatctactctgaaaaagtaacagacaccatcagcaggtgcctcactcctgatgcggaagctcgtccagatattgtagaagtcagttcgatgatatcagatgtcatgatgaaatatttagacaacttatctacatcccagttgtccttggaaaagaagctagaacgggaacgaagacgcacacaaaggtattttatggaagccaaccggaacaccgtcacatgtcaccatgagctggctgttctatctcacgagacctttgagaaggcaagtttgagtagcagcagcagtggagcagccagcctgaaaagtgaactttcagaaagcgcagacctgccccctgaaggcttccaggcctcctatggtaaagacgaagacagggcctgtgacgaaatcctgtcagatgataacttcaacctggaaaatgctgagaaagatacatattcagaggtagatgatgaattggacatttcggataactccagcagctccagttcaagccctctgaaagaatctacattcaacattttaaagagaagttttagtgcttcaggaggagaaagacaatcccaaacaagggacttcactggaggaacaggatcaagaccaagaccagggccacagatgggcacattcttgtggcaagcatcagcaggaattgctgtgtcccagaggaaagtgcgtcagatcagtgatcctattcagcagatattaattcagctgcacaaaataatctatatcacacagcttcctccagctttgcaccacaatttgaaaagaagggttatagagagattcaagaaatccctcttcagccagcagagtaacccttgtaatttgaaatctgaaattaaaaagttatctcagggatctccagaaccgattgagcccaactttttcacagcagattaccatttattacatcgttcatccggtggaaacagcctgtccccaaatgaccctacaggtttaccaaccagcattgaattggaggaaggaataacatatgaacagatgcagactgtgattgaagaagtccttgaggaaagtggctattacaattttacatctaacaggtatcattcctatccatgggggaccaagaatcacccaaccaaaagatgaaaatgctgcattttgagtggacttgattttctcagtgaagttcaagttctggacttcagccgctattgcaagatgcccaaggattgggtgctgctagagggtgtggaaaagaccaagatgccatggggcctgcaggacttctttctgggggtcctgtgctggagtatatgacagctgcggtacttgagggcttcattgccagaacacattatatacaggatgtcagagctaccagtgtgctgctgggagaaaatgctgcaaaattcatcttttggagggtggggggaaaacccaaaaacaacaacaaaaaaactctcttacagaattttccttaacattaaaaaaaacttgtcatattt

SEQ ID NO: 28 - DNA, 2816 bp, Homo sapiens
ctagcataaagaggaaatagaaggaaagcaataagtaagaaagtacatatttcaatctgaaaatgcttggcactactacccttggaaaatgtagagaagtagccagtagccgcgcctggggagtcgcctgaacgtgacggcagcaaatgcagattgttgggtctccgggaccaggagcagcgtggccagtgaagcgcgtggttttcccaaatggtgaacaattcttgttatctgtggccacaaagaaagttatttgtctctgtcttggcaaggctgggaggaaagttttagctaagaaactcagcccattggagaccatggataagtacgatgtgattaaggccatcgggcaaggtgccttcgggaaagcatacttagctaaagggaaatcagatagcaagcactgtgtcataaaagagatcaattttgaaaagatgcccatacaagaaaaagaagcttcaaagaaagaagtgattcttctggaaaagatgaaacatcccaacattgtagccttcttcaattcatttcaagagaatggcaggctgtttattgtaatggaatattgtgatggaggggatctcatgaaaaggatcaatagacaacggggtgtgttatttagtgaagatcagatcctcggttggtttgtacagatttctctaggactaaaacatattcatgacaggaagatattacacagggacataaaagctcagaacatttttcttagcaagaacggaatggtggcaaagcttggggactttggtatagcaagagtcctgaataattccatggaacttgctcgaacttgtattggaacaccttactacctgtccccagagatctgtcagaataaaccctacaacaataaaacggatatttggtctcttggctgtgtcttatatgagctctgcacacttaaacatccttttgagggtaacaacttacagcagctggttctgaagatttgtcaagcacattttgccccaatatctccggggttttctcgtgagctccattccttgatatctcagctctttcaagtatctcctcgagaccgaccatccataaattccattttgaaaaggccctttttagagaatcttattcccaaatatttgactcctgaggtcattcaggaagaattcagtcacatgcttatatgcagagcaggagcgccagcttctcgacatgctgggaaggtggtccagaagtgtaaaatacaaaaagtgagattccagggaaagtgcccaccaagatcaaggatatctgtgccaattaaaaggaatgctatattgcatagaaatgaatggagaccaccagctggagcccagaaggccagatctataaaaatgatagaaagacccaaaattgctgctgtctgtggacattatgattattattatgctcaacttgatatgctgaggaggagagcccacaaaccaagttatcaccctattcctcaagaaaatactggagttgaggattacggtcaggaaacgaggcatggtccatccccaagtcaatggcctgctgagtaccttcagagaaaatttgaagctcaacaatataagttgaaagtggagaagcaattgggtcttcgtccatcttctgccgagccaaattacaaccagagacaagagctaagaagtaatggagaagagcctagattccaggagctgccatttaggaaaaacgaaatgaaggaacaggaatattggaagcagttagaggaaatacgccaacagtaccacaatgacatgaaagaaattagaaagaagatggggagagaaccagaggagaactcaaaaataagtcataaaacctatttggtgaagaagagtaacctgcctgtccatcaagatgcatctgagggagaagcacctgtgcaggacattgaaaaagacttgaaacaaatgaggcttcagaacacaaaggaaagtaaaaatccagaacagaaatataaagctaagaagggggtaaaatttgaaattaatttagacaaatgtatttctgatgaaaacatcctccaagaggaagaggcaatggatataccaaatgaaactttgacctttgaggatggcatgaagtttaaggaatatgaatgtgtaaaggagcatggagattatacagacaaagcatttgaaaaacttcactgcccagaagcagggttttccacgcagactgtagctgctgtgggaaacaggaggcagtgggatggaggagcgcctcagactctgctgcagatgatggcagtggccgacatcacctccacctgccccacggggcctgacaatggccaagttattgtgattgaaggcattccaggaaacaggaaacagtggcggcatgaagctccaggaactttaatgagtgttttggcagcagcacatctaacgagtagctcattttctgccgatgaagaatttgcaatgggaacattaaaacaatggctacccaaagaagaagatgaagggaaggtagaaatggtctctggcattgaagtagatgaggaacaactagaaccaagatctgatgatgatgatacaaattttgaagaatctgaagatgagttgagagatgaagtagtagaatacttagaaaaactcgctactttcaaaggggaagaaaaaacagaagaggcctccagtacctctaaggactctagaaagtcaagagaaagagaggggataagtatgcagaaatctgaagaattaagggagggcttggagaatatttctactacatctaatgaccacatttgtattactgatgaagaccaaggaacatcaacaaccagtcaaaatatacaagtgtga

SEQ ID NO: 29 - DNA, 5583 bp, Homo sapiens
cagtcaagtagcttcccagtcccgaacgccgcccgtccccaccccgccgtggccactagcaacgacctctgtgaagttggagaggcggtaacggaggcactccccctgctgcaccccgccgtttctacggggctcagaaaccagtttgtttgtttcgtcggggtagtgtcgacctgtcttacgggcgtcgcccgagacaggacggagtcaaacccgtggtatcaactgaagacgagtgtcaggtgtggagagtctcagtgccccctttcagtctggactgtgagctgctgctggttagacagtcttggtttctctttcaggatgtcattttcaaaatgcgggatggtacctctgctttattaagccccgtaggaagactgccacacctagactgatgcttattagtcatcaccgttattcctactaacgtcctgtgtcactgagttttttaaatgtctagcatatctgtaaagatgccttagaaaaagaatcatggagaagtatgttagactacagaagattggagaaggttcatttggaaaagccattcttgttaaatctacagaagatggcagacagtatgttatcaaggaaattaacatctcaagaatgtccagtaaagaaagagaagaatcaaggagagaagttgcagtattggcaaacatgaagcatccaaatattgtccagtatagagaatcatttgaagaaaatggctctctctacatagtaatggattactgtgagggaggggatctgtttaagcgaataaatgctcagaaaggcgttttgtttcaagaggatcagattttggactggtttgtacagatatgtttggccctgaaacatgtacatgatagaaaaattcttcatcgagacattaaatctcagaacatatttttaactaaagatggaacagtacaacttggagattttggaattgctagagttcttaatagtactgtagagctggctcgaacttgcatagggaccccatactacttgtcacctgaaatctgtgaaaacaaaccttacaataataaaagtgacatttgggctctggggtgtgtcctttatgagctgtgtacacttaaacatgcttttgaagctggcagtatgaaaaacctggtactgaagataatatctggatcttttccacctgtgtctttgcattattcctatgatctccgcagtttggtgtctcagttatttaaaagaaatcctagggatagaccatcagtcaactccatattggagaaaggttttatagccaaacgcattgaaaagtttctctctcctcagcttattgcagaagaattttgtctaaaaacattttcgaagtttggatcacagcctataccagctaaaagaccagcttcaggacaaaactcgatttctgttatgcctgctcagaaaattacaaagcctgccgctaaatatggaatacctttagcatataagaaatatggagataaaaaattacacgaaaagaaaccactgcaaaaacataaacaggcccatcaaactccagagaagagagtgaatactggagaagaaaggaggaaaatatctgaggaagcagcaagaaagagaaggctggaatttattgaaaaagaaaagaaacaaaaggatcagattattagtttaatgaaggctgaacaaatgaaaaggcaagaaaaggaaaggttggaaagaataaatagggccagggaacaaggatggagaaatgtgctaagtgctggtggaagtggtgaagtaaaggctccttttctgggcagtggagggactatagctccatcatctttttcttctcgaggacagtatgaacattaccatgccatttttgaccaaatgcagcaacaaagagcagaagataatgaagctaaatggaaaagagaaatatatggtcgaggtcttccagaaagaggaattctgcctggagttcgtccaggatttccttatggggctgcaggtcatcaccattttcctgatgctgatgatattagaaaaactttgaaaagattgaaggcggtgtctaaacaagccaatgcaaacaggcaaaaagggcagctagctgtagaaagagctaaacaagtagaagagttcctgcagcgaaaacgggaagctatgcagaataaagctcgagccgaaggacatatgggaatcctgcaaaacctggcagctatgtatggaggcaggcccagctcttcaagaggagggaagccaagaaacaaagaggaagaggtttatctggcaagactgaggcaaataagactacagaatttcaatgagcgccaacagattaaagccaaacttcgtggtgaaaagaaagaagctaatcattctgaaggacaagaaggaagtgaagaggctgacatgaggcgcaaaaaaatcgaatcactgaaggcccatgcaaatgcacgtgctgctgtactaaaagaacaactagaacgaaagagaaaggaggcttatgagagagaaaaaaaagtgtgggaagagcatttggtggctaaaggagttaagagttctgatgtttctccacctttgggacagcatgaaacaggtggctctccatcaaagcaacagatgagatctgttatttctgtaacttcagctttgaaagaagttggcgtggacagtagtttaactgatacccgggaaacttcagaagagatgcaaaagaccaacaatgctatttcaagtaagcgagaaatacttcgtagattaaatgaaaatcttaaagctcaagaagatgaaaaaggaaagcagaatctctctgatacttttgagataaatgttcatgaagatgccaaagagcatgaaaaagaaaaatcagtttcatctgatcgcaagaagtgggaggcaggaggtcaacttgtgattcctctggatgagttaacactagatacatccttctctacaactgaaagacatacagtgggagaagttattaaattaggtcctaatggatctccaagaagagcctgggggaaaagtccgacagattctgttctaaagatacttggagaagctgaactacaacttcagacagaactattagaaaatacaactattagaagtgagatttctcccgaaggggaaaagtacaaacccttaattactggagaaaaaaaagtacaatgtatttcacatgaaataaacccatcagctattgttgattctcctgttgagacaaaaagtcccgagttcagtgaggcatctccacagatgtcattgaaactggaaggaaatttagaagaacctgatgatttggaaacagaaattctacaagagccaagtggaacaaacaaagatgagagcttgccatgcactattactgatgtgtggattagtgaggaaaaagaaacaaaggaaactcagtcggcagataggatcaccattcaggaaaatgaagtttctgaagatggagtctcgagtactgtggaccaacttagtgacattcatatagagcctggaaccaatgattctcagcactctaaatgtgatgtagataagtctgtgcaaccggaaccatttttccataaggtggttcattctgaacacttgaacttagtccctcaagttcaatcagttcagtgttcaccagaagaatcctttgcatttcgatctcactcgcatttaccaccaaaaaataaaaacaagaattccttgctgattggactttcaactggtctgtttgatgcaaacaacccaaagatgttaaggacatgttcacttccagatctctcaaagctgttcagaacccttatggatgttcccaccgtaggagatgttcgtcaagacaatcttgaaatagatgaaattgaagatgaaaacattaaagaaggaccttctgattctgaagacattgtgtttgaagaaactgacacagatttacaagagctgcaggcctcgatggaacagttacttagggaacaacctggtgaagaatacagtgaagaagaagagtcagtcttgaagaacagtgatgtggagccaactgcaaatgggacagatgtggcagatgaagatgacaatcccagcagtgaaagtgccctgaacgaagaatggcactcagataacagtgatggtgaaattgctagtgaatgtgaatgcgatagtgtctttaaccatttagaggaactgagacttcatctggagcaggaaatgggctttgaaaaattctttgaggtttatgagaaaataaaggctattcatgaagatgaagatgaaaatattgaaatttgttcaaaaatagttcaaaatattttgggaaatgaacatcagcatctttatgccaagattcttcatttagtcatggcagatggagcctaccaagaagataatgatgaataatcctcaaaatgttttttaatcctcaactatatgaaagcatttgaatttggcttatcagaataacaagcttcagtgggaaatacagcaattatttatttaaaaaatcagatttaagatggactttcttattgcatgaaaaagatggagaaacatgccatttttcaatgaagattctaatattttatctattttgttcattgaattccatggttaaatctcataaaatatatactttattaaatcatccaaccaaagcataggaaacattgacccagaacctgacttaatggttttgaagatttactatgcaatagggtaactttgagtttcagcaaatgtctttaggttgaaggaattacctatgtcatgaaggacctgtctgtggtttttcaatggagtctttaagcatgatcttttttctgtctagtacttgttttcattctggccagcagttctacattaaatcaccttgtcaagggctctgtttacatctacacattttgaagatgaaatttttagccttaaagtttatattctcaagtccttttacaatcagtgtgtctcctgaactagcacacaggctgtagaaacagtcttagaaatcattgaaagatttgattatgaaagaatagcaaaattatatttcttgacatataaaaagttggtttaatgcctttatttctctttaaggaccagaaccaggaatactatatcgaaaaattagtctgtggatttaacactgacttagcatatagcttaaagttgctcttttggtttttaacttcctccatacataagcttcaaggacaataagatgttaaaaaggaggaaataattatttttattttgacactgtgacagttttggtaactaggatcctagggagggaaatgtttgcctgttgaacttctttctgttatgagaggatttagttaggtcattaagatgttgatcacacagcttcaatcacaatatgccaagtataacctggtttcgttagaggtgtctacagtccagatgttcttcgtaataaaagcaaagtttttgaacctctgagtccaaagcaggctggttggcataatatgtaatttgaaaaataaaatcttatcttgcagcactatcagtatgttgaatttattatgtatattatttctaatatccgaaactaaatacttgattttttaatatgtgtgtttattttatgatattgctattaaatttttattatct

SEQ ID NO: 30 - DNA, 2326 bp, Homo sapiens
cagaactcagttagtcggggacaatttccctcaatgttaacagcactgttccaccgcaacgtggaacaacagctttaaaacgtgctcttcgtaggcccggctactccaagaacagtgcctcccgccagacccaggcggcttccttcacccgcaacccgagagacgacccgccgggcccgccccgcggaagccgccggttgccaggccaaggagtggactagggtcgccggggaagcggtttgggagagcccatggtgactgcgtgagtggagcccagctgtgtggatgccccagcatggatgactacatggtcctgagaatgattggggagggctccttcggcagagctcttttggttcagcatgaaagcagtaatcagatgtttgccatgaaagaaataaggcttcccaagtctttctctaatacacagaattctaggaaggaggctgttcttttagccaaaatgaaacaccctaatattgttgccttcaaagaatcatttgaagctgaaggacacttgtatattgtgatggaatactgtgatggaggggatctaatgcaaaagattaaacagcagaaaggaaagttatttcctgaagacatgatacttaattggtttacccaaatgtgccttggagtaaatcacattcacaagaaacgtgtgctacacagagatatcaagtccaagaatatcttcctcactcagaatggaaaagtgaaattgggagactttggatctgcccgtcttctctccaatccgatggcatttgcttgtacctatgtgggaactccttattatgtgcctccagaaatttgggaaaacctgccttataacaataaaagtgacatctggtccttgggttgcatcctgtatgaactctgtacccttaagcatccatttcaggcaaatagttggaaaaatcttatcctcaaagtatgtcaagggtgcatcagtccactgccgtctcattactcctatgaacttcagttcctagtcaagcagatgtttaaaaggaatccctcacatcgcccctcggctacaacgcttctctctcgaggcatcgtagctcggcttgtccagaagtgcttaccccccgagatcatcatggaatatggtgaggaagtattagaagaaataaaaaattcgaagcataacacaccaagaaaaaaaacaaaccccagcagaatcaggatagctttgggaaatgaagcaagcacagtgcaagaggaagaacaagatagaaagggtagccatactgatttggaaagcattaatgaaaatttagttgaaagtgcattgagaagagtaaacagagaagaaaaaggtaataagtcagtccatctgaggaaagccagttcaccaaatcttcatagacgacagtgggagaaaaatgtacccaatacagctcttacagctttggaaaatgcatccatactcacctccagtttaacagcagaggacgatagaggtggttctgtaataaagtacagcaaaaatactactcgtaagcagtggctcaaagagacccctgacactttgttgaacatccttaagaatgctgatctcagcttggcttttcaaacatacacaatatatagaccaggttcagaagggttcttgaaaggccccctgtctgaagaaacagaagcatcggacagtgttgatggaggtcacgattctgtcattttggatccagagcgacttgagcctgggctagatgaggaggacacggactttgaggaggaagatgacaaccccgactgggtgtcagagctgaagaagcgagctggatggcaaggcctgtgcgacagataatgcctgaggaaatgttcctgagtcacgctgaggagagccttcactcaggagttcatgctgagatgatcatgagttcatgcgacgtatattttcctttggaaacagaatgaagcagaggaaactcttaatacttaaaatcgttcttgattagtatcgtgagtttgaaaagtctagaactcctgtaagtttttgaactcaagggagaaggtatagtggaatgagtgtgagcatcgggctttgcagtcccatagaacagaaatgggatgctagcgtgccactacctacttgtgtgattgtgggaaattacttaacctcttcaagccccaatttcctcaaccataaaatgaagataataatgcctacctcagagggatgctgaccacagacctttatagcagcccgtatgatattattcacattatgatatgtgtttattattatgtgactctttttacatttcctaaaggtttgagaattaaatatatttaattatgaaaaaaaaaaaaaaaa

SEQ ID NO: 31 - DNA, 1156 bp, Homo sapiens
agtcggggcggggtcttgctcctaggcaggcctctgctggcatgagccctaagtgccgggcactgaccacagccggcagccggagggtcaggagggccttggaggagagatgcccggcaaacagtctgaggaagggccggcggaggcaggggcttcggaggacagcgaggaggagggtctgggcggcctgacattagaggagctccagcagggccaggaggctgcccgcgcgctggaggacatgatgacgctgagtgctcagaccctggtccgagccgaggtggacgagctctacgaggaagtgcgtcccctgggccagggtcgctatggccgcgtccttctggtcacccatcgtcagaaaggcacacccctggcactgaagcagctcccgaaaccccgcacgtccctccgtggcttcctgtacgagttctgtgtggggctctcgctgggcgcgcactcagccatcgtgacggcctacggcattggcatcgagtcggcacactcctacagcttcctgacggagcccgtcctgcacggggacctcatggccttcatccagcccaaggtgggcctcccgcagcccgcggtgcaccgctgcgccgcccagctggcctccgccctggagtacatccacgcccgcggcctggtgtaccgggacctgaagccggagaacgtcctggtgtgcgacccggcctgccggcgcttcaagctgaccgacttcggccacacgaggcctcgcgggacgctgctgcgcctggccgggccgcccatcccctacacggcccccgagctctgcgcgcccccgccgctccccgagggcctgcccattcagcccgccctggacgcctgggcgctgggcgtcctgctcttctgcctcctcacgggctacttcccctgggaccggcccctggccgaggccgaccccttctacgaggacttcctcatctggcaggcgtcgggccagccccgggaccgccctcagccctggttcggcctggccgccgcggccgacgcgcttctgcgggggctgctggaccctcacccccgaaggaggagcgctgtgatcgccatcagggagcacctggggcgcccctggaggcagcgggagggcgaggcggaggcagtgggagcggtggaagaggaggctgggcagtga

SEQ ID NO: 32 - DNA, 1853 bp, Homo sapiens
gctttctggggagccctgacgggggggtcccgcccaagggccaccccacatcaggaagccctgagatggagcgcagggcctccgagacccctgaggatggggacccagaggtgagagacgggagccaggggaggaagacagagagagaaaagaaggagagagaggcaggaggcaacacggggagagagaggaagagaaacagaaaacagggaaacgcaaagacctcagagacccagacccagggagagaggatgacagagatccaaggacacacagcgagaccaaggcccccagagaaatggactcagaaacacacagcgggatgcacaggggaagaggacggtggagagagagaccagggtgggcagggggactgtgtgggctgaggatgcacccccactcggggctgggggctcctggcctgctcccacagacaggggcaggcggggcctctgtggcagtgacccctaacctctccaggacacaaaaacaggtggcccgagtccgggaggacacagccacagccctccaacggctggtggagctgacgaccagcagggtgaccccggtgaggagccttcgggaccagtaccacctcatccggaagctgggctccggctcctacggccgcgtgctcctcgcccagcctcaccaggggggtccagctgtggctctgaagctcctgcgtcgggatttggtcctgagaagcaccttcctgagggagttctgtgtgggccgctgcgtctctgcacacccaggcctgctgcagaccctggcaggacccctacagaccccccgctattttgccttcgcccaggagtacgcgccctgtggggacctcagcgggatgctgcaggaaaggggcctcccagaactgctggtgaagcgggtggtggcccagttggcaggagctctggacttcctccacagccgggggctggtccacgcagatgtcaaacctgacaacgtgctggtcttcgacccagtctgcagccgtgtggccctgggagacctgggtctgacccggccagagggcagcccgacccccgccccaccagtgcctctgcccacggcaccgcctgagctctgtctcctgctaccgcccgacaccctgcctctgcggccagccgtggactcctggggcctgggggtgcttctcttctgtgctgccactgcctgtttcccttgggacgtggcactggcccccaaccctgagttcgaggccttcgctggctgggtgaccaccaagcctcagccacctcagccaccaccaccctgggaccagtttgcgcccccagccctggccttgctccaggggcttctggacctggatcccgagactaggagccccccactggctgtcctggacttcctgggggacgactgggggttgcaagggaacagagagggacctggggttttggggagcgccgtgtcctatgaggacagggaggagggaggctcaagcctggaggagtggacagatgagggtgatgacagcaaaagtggtgggaggacggggacagatgggggagctccctgaccaggtgacagagacaggtggccagagcctgggccagaggcccttcccccagcccccagggccacctggatggagagacagctgcacccgggaggacagagagggaacacattgcactctccctacggaacgctgggcttggacgcgcattcctcttccaactgaggacccaagagcccagctcctgcccctcctctctcagacgcaggatccaggctcccatcccttcctccctcaaggacctttcctcttccctccgtccagagtgtcttcttttttatttttattttttttagacagaatctcggtc

SEQ ID NO: 33 - DNA, 3765 bp, Homo sapiens
gggggcggggcctgggcgcggcccgggctcggcagctctcggggaagctctgctctggctccggcaggcacaggcggctcgggaggtgcgcgccggctccgcccccgggccccgcccgtccgccgcgcgcccgcgcctcccaattcccagagccggggctggggctctaggctgccgcggcggctctaggctgggctgctgggcgcgaggccagggcgggccgggagaggctgcgccggcggcggatcgcgcagagggcggtggcctgggctggccgaaccatggcggccccggagccggcgccgaggcgggcccgggaacgggagcgggagcgggaggacgagagcgaggacgagagcgacatcctggaggaaagcccgtgtggtcgctggcaaaagcgacgggagcaggtaaaccaagggaacatgccagggcttcagagcaccttcctagccatggacacggaggagggggtagaggtggtgtggaacgagctccacttcggagacaggaaggccttcgcggcgcacgaggagaagatccagaccgtgttcgagcagctggtgctggtggaccacccgaacatcgtgaagttgcacaagtactggctggatacctctgaggcctgcgcgagggtcatcttcatcacagagtacgtgtcatcaggcagcctcaagcaattcctcaaaaagaccaagaagaaccacaaggccatgaacgcccgggcctggaagcgctggtgcacgcagatcctgtctgcgctcagcttcctgcacgcctgcagccccccaatcatccacgggaacctgaccagcgacaccatcttcattcagcacaacggcctcatcaagatcggctccgtgtggcaccgaatcttctccaatgctctgcgccctcccacagcacttccagatgatctccgaagccccatccgcgctgagcgagaggaacttcggaacctgcacttcttccccccagagtatggagaggtggccgatgggaccgctgtggacatcttctcctttgggatgtgtgcgctggagatggctgtactggaaatccagaccaatggggacacccgggtcacagaggaggccattgctcgcgccaggcactcgctgagtgaccccaacatgcgggagttcatcctttgctgcctggcccgggaccctgcccgccggccctctgcccacagcctcctcttccaccgcgtgctcttcgaggtgcactcgctgaagctcctggcagcccactgcttcatccagcaccagtacctcatgcctgagaatgtggtggaggagaagaccaaggccatggacctgcacgcggtcttggcggagcttccccggccccgcaggcccccgctgcagtggcggtactcggaagtctccttcatggagctggacaaattcctggaggatgtcaggaatggaatctacccactgatgaactttgcagccactcgacccctggggctgccccgtgtgctggccccacccccggaggaggtccaaaaggccaagaccccgacgccagagccctttgactctgagaccagaaaggtcatccagatgcagtgcaacctggagagaagcgaggacaaggcgcgctggcatctcactctgcttctggtgctggaagaccggctgcaccggcagctgacctacgacctgctcccaacggacagcgcccaggacctcgcctcggagctcgtgcactatggcttcctccacgaggacgaccggatgaagctggccgccttcctggagagcaccttcctcaagtaccgtgggacccaggcctgacccggagccccagccccaggggaccatgccggggtgctgcctgggcaggccatgttggggagactccagcaccgtggggctgccctcctccatgcgcctgggagcacaaaggccccggtagtgaaggaaccccccgtctcctgagagtggggctgaccctgccttgggcgccgaggggttggggggtgggtgtgggggagccgttaggcctcccaggtccttaggatcagggttgcccccagaaccccttcccatatcctccattctccgccctgagttcctacccaggctgcctggccggggccactgcctcctcagcatgcaggaggctgccctgtagggaaccccagctctggggcttgggggtgagggtcagccctggacagacctctgcccagggaactgctccatggggtctgggagagcagccatcccctgctggcaccatagacccacacaaggagcctgcacagcaagccagcggtgacacacctgcaggtgtcaggcatggcactgggcacaacagggacctggcaggagaaacagaccacagagaggtctggagttgaggctgttgtcagcaaagcccctggtcccacacagctctgccctagagccacctctttgaccctttacccaccctgagaccagaacttgcagcccctctgcagatctcctctggccactgcagcccctccaatgggctttttctctcatgcattccctggcctggaggcgtcagggaccccacatcctccctgctcctcagactcacagcccctccatgttacctcccgcacctcctccctggggcagctgctccctgggcctctgaggatgtcagctcctggctccctgcctctctcccactccactcctggctcagtcttagagatttctatgccctcatggattctacccctgccttcctggcctcttgattcttggcttgcctctcctccaattccaaacttagtgaaatggccttaagcattttaaactgtatgtatacattagcgcattcatgcctttctaaacgcatttcaaatgtcaaccaggaaggcacaccactgtattagttttatactgccgctgtaaaatttaccacaaacttagtgacttaacacaaatttattgcaattctgtaggctggaagtctgactatgggtctcactggactagaatcaaggctggcaggctgccttccttcctggaggttctaggggagactctgtctcctgctccttcaggctgctggcagaatccacatcctttcggtggcagggccaaggtccccactttcttgctgactgtaaactaaggccacttccagcttgtagaggctgcctacattccttggctcttggccccctcctccatcttcagagctagcaggttcagtctgtgtcacgaaccatttctctggttccctgcagacaggaaaggttgtccctaaggactcatgagattaggttgggcccagccagataatacatgataatctccctcctcaaggtttttaatattaaacacatctgcaggacacattttgccatgtaaactaacattcactggttccagggattaaggaatgaacctcttttgttggggaagggtggcattctgctgaccacagcactccaaccaaaagccaaaaaccaaagcaagacttactaacgcatatcaaataaattaaaggtacaaaatcgtgaatctcagttatcttaaatattccaatactatttacaaaattattcaaattctcacgccttccaactcaaaattagcaatctaaagtaatttccatatcctagatggaaaccctcatgctaaactgtctgattatgcatggttctaaatggtttcagtggcaaatacataacattgtactactgattaaactgaacttaaaagcaaaaaaatctatgtcgggtgcggagaaagaggtaatgaaatggca

SEQ ID NO: 34 - DNA, 2535 bp, Homo sapiens
cccgggcaaaagcgagcgccgcccctgcctctccgctgctggctggaacgctgatctatctagttgctggggagacgcccccagatgcccgggccccactcggacttcagcacacatcccgaaggatggggaaagaaagaggcccccacgagcgggactcgcagtggccaaggaggggtgagaggcggacagggatcagctggcccctgcggcctggttgcacctgcatggtgactagctgccgggctgcgccccggggcgcggcgaggaggcggggtctggcagtgcgttgggtgggggaggagcttctgggtgatgtaaggccgggaatgggagtggcctctcctcgactcgctgctaggaagggggcgggactctcggtgaccagacgccggggagggggcaggcgttcattgataaaacgctgggctcccctgggcgccagcgcagcgtagcaaatccaggcagcgccacgcgcggccggggccgggcggaaccgagaagccgggaccgcgctgcgacgcgccggccgcatggagcctgccgccggtttcctgtctccgcgccccttccagcgtgcggccgccgcgcccgctcccccggccgggcccgggccgcctccgagtgccttgcgcggacctgagctggagatgctggccgggctaccgacgtcagaccccgggcgcctcatcacggacccgcgcagcggccgcacctacctcaaaggccgcttgttgggcaaggggggcttcgcccgctgctacgaggccactgacacagagactggcagcgcctacgctgtcaaagtcatcccgcagagccgcgtcgccaagccgcatcagcgcgagaagatcctaaatgagattgagctgcaccgagacctgcagcaccgccacatcgtgcgtttttcgcaccactttgaggacgctgacaacatctacattttcttggagctctgcagccgaaagtccctggcccacatctggaaggcccggcacaccctgttggagccagaagtgcgctactacctgcggcagatcctttctggcctcaagtacttgcaccagcgcggcatcttgcaccgggacctcaagttgggaaattttttcatcactgagaacatggaactgaaggtgggggattttgggctggcagcccggttggagcctccggagcagaggaagaagaccatctgtggcacccccaactatgtggctccagaagtgctgctgagacagggccacggccctgaggcggatgtatggtcactgggctgtgtcatgtacacgctgctctgcgggagccctccctttgagacggctgacctgaaggagacgtaccgctgcatcaagcaggttcactacacgctgcctgccagcctctcactgcctgcccggcagctcctggccgccatccttcgggcctcaccccgagaccgcccctctattgaccagatcctgcgccatgacttctttaccaagggctacacccccgatcgactccctatcagcagctgcgtgacagtcccagacctgacaccccccaacccagctaggagtctgtttgccaaagttaccaagagcctctttggcagaaagaagaagagtaagaatcatgcccaggagagggatgaggtctccggtttggtgagcggcctcatgcgcacatccgttggccatcaggatgccaggccagaggctccagcagcttctggcccagcccctgtcagcctggtagagacagcacctgaagacagctcaccccgtgggacactggcaagcagtggagatggatttgaagaaggtctgactgtggccacagtagtggagtcagccctttgtgctctgagaaattgtatagccttcatgcccccagcggaacagaacccggcccccctggcccagccagagcctctggtgtgggtcagcaagtgggttgactactccaataagttcggctttgggtatcaactgtccagccgccgtgtggctgtgctcttcaacgatggcacacatatggccctgtcggccaacagaaagactgtgcactacaatcccaccagcacaaagcacttctccttctccgtgggtgctgtgccccgggccctgcagcctcagctgggtatcctgcggtacttcgcctcctacatggagcagcacctcatgaagggtggagatctgcccagtgtggaagaggtagaggtacctgctccgcccttgctgctgcagtgggtcaagacggatcaggctctcctcatgctgtttagtgatggcactgtccaggtgaacttctacggggaccacaccaagctgattctcagtggctgggagcccctccttgtgacttttgtggcccgaaatcgtagtgcttgtacttacctcgcttcccaccttcggcagctgggctgctctccagacctgcggcagcgactccgctatgctctgcgcctgctccgggaccgcagcccagcctaggacccaagccctgaggcctgaggcctgtgcctgtcaggctctggcccttgcctttgtggcc

SEQ ID NO: 35 - DNA, 5525 bp, Homo sapiens
gcggccgcgggggcggcggaggatatggagtaaagccagagtcagtggccaggcacgaaggcagagcaggaacagccaggaggcgtttattaggggggcggggggaaagagccccagcaccgcccctcctggaagaaggaagaggtaactataactacccaatattgcagccatggagtccatgcttaataaattgaagagtactgttacaaaagtaacagctgatgtcactagtgctgtaatgggaaatcctgtcactagagaatttgatgttggtcgacacattgccagtggtggcaatgggctagcttggaagatttttaatggcacaaaaaagtcaacaaagcaggaagtggcagtttttgtctttgataaaaaactgattgacaagtatcaaaaatttgaaaaggatcaaatcattgattctctaaaacgaggagtccaacagttaactcggcttcgacaccctcgacttcttactgtccagcatcctttagaagaatccagggattgcttggcattttgtacagaaccagtttttgccagtttagccaatgttcttggtaactgggaaaatctaccttcccctatatctccagacattaaggattataaactttatgatgtagaaaccaaatatggtttgcttcaggtttctgaaggattgtcattcttgcatagcagtgtgaaaatggtgcatggaaatatcactcctgaaaatataattttgaataaaagtggagcctggaaaataatgggttttgatttttgtgtatcatcaaccaatccttctgaacaagagcctaaatttccttgtaaagaatgggacccaaatttaccttcattgtgtcttccaaatcctgaatatttggctcctgaatacatactttctgtgagctgtgaaacagccagtgatatgtattctttaggaactgttatgtatgctgtatttaataaagggaaacctatatttgaagtcaacaagcaagatatttacaagagtttcagtaggcagttggatcagttgagtcgtttaggatctagttcacttacaaatatacctgaggaagttcgtgaacatgtaaagctactgttaaatgtaactccgactgtaagaccagatgcagatcaaatgacaaagattcccttctttgatgatgttggtgcagtaacactgcaatattttgataccttattccaaagagataatcttcagaaatcacagtttttcaaaggactgccaaaggttctaccaaaactgcccaagcgtgtcattgtgcagagaattttgccttgtttgacttcagaatttgtaaaccctgacatggtaccttttgttttgcccaatgttctacttattgctgaggaatgcaccaaagaagaatatgtcaaattaattcttcctgaacttggccctgtgtttaagcagcaggagccaatccaggctagcaacatgattttgttaattttcctacaaaaaatggatttgctactaaccaaaacccctcctgatgagataaagaacagtgttctacccatggtttacagagcactagaagctccttccattcagatccaggagctctgtctaaacatcattccaacctttgcaaatcttatagactacccatccatgaaaaacgctttgataccaagaattaaaaatgcttgtctacaaacatcttcccttgcggttcgtgtaaattcattagtgtgcttaggaaagattttggaatacttggataagtggtttgtacttgatgatatcctacccttcttacaacaaattccatccaaggaacctgcggtcctcatgggaattttaggtatttacaaatgtacttttactcataagaagttgggaatcaccaaagagcagctggccggaaaagtgttgcctcatcttattcccctgagtattgaaaacaatcttaatcttaatcagttcaattctttcatttccgtcataaaagaaatgcttaatagattggagtctgaacataagactaaactggagcaacttcatataatgcaagaacagcagaaatctttggatataggaaatcaaatgaatgtttctgaggagatgaaagttacaaatattgggaatcagcaaattgacaaagtttttaacaacattggagcagaccttctgactggcagtgagtccgaaaataaagaggacgggttacagaataaacataaaagagcatcacttacacttgaagaaaaacaaaaattagcaaaagaacaagagcaggcacagaagctgaaaagccagcagcctcttaaaccccaagtgcacacacctgttgctactgttaaacagactaaggacttgacagacacactgatggataatatgtcatccttgaccagcctttctgttagtacccctaaatcttctgcttcaagtactttcacttctgttccttccatgggcattggtatgatgttttctacaccaactgataatacaaagagaaatttgacaaatggcctaaatgccaatatgggctttcagacttcaggattcaacatgcccgttaatacaaaccagaacttctacagtagtccaagcacagttggagtgaccaagatgactctgggaacacctcccactttgccaaacttcaatgctttgagtgttcctcctgctggtgcaaagcagacccaacaaagacccacagatatgtctgcccttaataatctctttggccctcagaaacccaaagttagcatgaaccagttatcacaacagaaaccaaatcagtggcttaatcagtttgtacctcctcaaggttctccaactatgggcagttcagtaatggggacacagatgaacgtgataggacaatctgcttttggtatgcagggtaatcctttctttaacccacagaactttgcacagccaccaactactatgaccaatagcagttcagctagcaatgatttaaaagatctttttgggtgaggtgtcttacttctattttgaaggattatttcagtttcaatcatgggtgagctgatttacatctttatatagttggcttggaggaagtacttctatgggaaagtgaacagttctgtgacaggaaacatctctgtccatgccagcatagtagttgtatggacttctaaccagttgagttttttaaagcattgaggattttttcctcttaccaactcctcttcaggtttttaaagacccagcccttcccaatctcaaagagaaaaaggaaactgagttatcttgaataacataactttttaatcaaatgtttattttggcttgtggatcttggtgttatttaaaaaattgaggtgatggtcattgcaagctcatctattaagtactatatggtacacagtctatgagtcattagtcttcattttaatatgtaaaaaatcttgatgctgtattgatttgtttgcatttaagatgacagtgagaaaatgataagcataaagagaagtatcaggttatttgctttttccaaacttttcagatgaactattgtttagtacagagactgagcaaatactacaaaattcaacttaaccttcatttcattggtttaaatgcgttattaaccatcttaagtgcaaactaatcattgtaaattatattttagcatggtctgcctcaaatagtaatgtatttttctgcattcacttggatatatttagaatcacttttttcctcctgtatcaaggaagaggtatgtgctgatttgtttggatatttgacaaggcactctgatgtgacttccctgactactaccttcatatttcatttcaaattcaaacttctgaggttgcagcatatatgaattgcattttcaaaagaagatttgtaagaattaaactatatttatgagtaaacttttgaggtttctgctgtattgtttcaaatgtaataaactttacttctgtaaaaattgagcagttgtatcttctgaccaccaacagattttcagcttgccatgatagtctgacctcattaattactgctactgaagttcaatttttttctaggaattttaggaaccttttgtttaaatattttaatttctattagccatttttaggaaggaaagaatcaattctcttaacaggaaacatgctttatttttcaaaacctttctctgatatttttctttaatttgctgattattcaaccacagagccttatgctataaatgtcatttgtattttaaaaaataatattccactcataaaactttaaaaccatctttcaacgaactatatatgtattatagttgctgccatagagttgatggtttttaattatctggaaccagcaatcatttaaaataaaccatattaagtttagtatgctggtattgtttattcattttatatgaatattcattgaaaatatatacacaatatatgtaatacacagcacttgattacaaaatgtaatttaattatattattgctggcagcattcagttaagagggtactttaaaaaatagaagtcagctttcacatctgatttctgtatgggctgtacttggttaacttgattttagaaaaaggactaacagaattgctaaagaaatgcatccaataaatgaaaaacagtaggaagatcaaatgtttttgtcaaatatattcacaacttgaccagattagctgtcctgtttgtaatgcaatattaatatgtcttttgggaaaaagcctacatatggaataaaataagtattgaagaatttttctttgtaacaatttagtagtcactgtttattgagaaattgttttttattttgtaaaataacatgatgttagtgttgaactcttaaacagaaagaaagcttaatataacagcttatagaacttgaactactaaatatgaaaataagtcatttgaaaaaaatacagtatgtaaaatttgttcattcgttgaggtaatggtgctatgtttttacaaaattgttcctacaccttttttctacttcaggtattttatttcaaccatttccatcaattgaactgttaccattgcctttttctgttgagaaattgcctctgaaaaatagtgctatttttcagcttaagtgttcttaagtgaatgaaattttcaaagtactagatcaccttaaaattatttcacgtactgaagacaattaagtccgttatgtttagagtagaaaatgtttaggttaaagagcatctgtcaacagaatctacaaaaaagattcccttgcatttgaattagttctctattctcctattgctaaatgtgtgatatatagagaggatgtataaaaggaaatggaaatagactatgtacttgtctggtttttgtttgtttttattttggaatgcttataagcctcctttacactgaataaggaagtagtttttgttttcttttgacctgtaaaatacctcacatggttgtttttacacatgaaagaaaaaggtatatgcgaacatacctgatatcaagaggagtatgcaccaaataaattttagctttgataaaactttccat

SEQ ID NO: 36 - DNA, 3715 bp, Homo sapiens
atagcaccattgaatcccagtcctaacagaagtactgcgaatcttgtggcctcattctgaacaaaagggattagagaagaaaaatctcttgatataaggcttgaaagcaagggcaggcaatcttggttgtgaatattttctgatttttccagaaatcaagcagaagattgagctgctgatgtcagttaactctgagaagtcgtcctcttcagaaaggccggagcctcaacagaaagctcctttagttcctcctcctccaccgccaccaccaccaccaccgccacctttgccagaccccacacccccggagccagaggaggagatcctgggatcagatgatgaggagcaagaggaccctgcggactactgcaaaggtggatatcatccagtgaaaattggagacctcttcaatggccggtatcatgttattagaaagcttggatgggggcacttctctactgtctggctgtgctgggatatgcaggggaaaagatttgttgcaatgaaagttgtaaaaagtgcccagcattatacggagacagccttggatgaaataaaattgctcaaatgtgttcgagaaagtgatcccagtgacccaaacaaagacatggtggtccagctcattgacgacttcaagatttcaggcatgaatgggatacatgtctgcatggtcttcgaagtacttggccaccatctcctcaagtggatcatcaaatccaactatcaaggcctcccagtacgttgtgtgaagagtatcattcgacaggtccttcaagggttagattacttacacagtaagtgcaagatcattcatactgacataaagccggaaaatatcttgatgtgtgtggatgatgcatatgtgagaagaatggcagctgaggccactgagtggcagaaagcaggtgctcctcctccttcagggtctgcagtgagtacggctccacagcagaaacctataggaaaaatatctaaaaacaaaaagaaaaaactgaaaaagaaacagaagaggcaggctgagttattggagaagcgcctgcaggagatagaagaattggagcgagaagctgaaaggaaaataatagaagaaaacatcacctcagctgcaccttccaatgaccaggatggcgaatactgcccagaggtgaaactaaaaacaacaggattagaggaggcggctgaggcagagactgcaaaggacaatggtgaagctgaggaccaggaagagaaagaagatgctgagaaagaaaacattgaaaaagatgaagatgatgtagatcaggaacttgcgaacatagaccctacgtggatagaatcacctaaaaccaatggccatattgagaatggcccattctcactggagcagcaactggacgatgaagatgatgatgaagaagactgcccaaatcctgaggaatataatcttgatgagccaaatgcagaaagtgattacacatatagcagctcctatgaacaattcaatggtgaattgccaaatggacgacataaaattcccgagtcacagttcccagagttttccacctcgttgttctctggatccttagaacctgtggcctgcggctctgtgctttctgagggatcaccacttactgagcaagaggagagcagtccatcccatgacagaagcagaacggtttcagcctccagtactggggatttgccaaaagcaaaaacccgggcagctgacttgttggtgaatcccctggatccgcggaatgcagataaaattagagtaaaaattgctgacctgggaaatgcttgttgggtgcataaacacttcacggaagacatccagacgcgtcagtaccgctccatagaggttttaataggagcggggtacagcacccctgcggacatctggagcacggcgtgtatggcatttgagctggcaacgggagattatttgtttgaaccacattctggggaagactattccagagacgaagaccacatagcccacatcatagagctgctaggcagtattccaaggcactttgctctatctggaaaatattctcgggaattcttcaatcgcagaggagaactgcgacacatcaccaagctgaagccctggagcctctttgatgtacttgtggaaaagtatggctggccccatgaagatgctgcacagtttacagatttcctgatcccgatgttagaaatggttccagaaaaacgagcctcagctggcgaatgccttcggcatccttggttgaattcttagcaaattctaccaatattgcattctgagctagcaaatgttcccagtacattggacctaaacggtgactctcattctttaacaggattacaagtgagctggcttcatcctcagacctttattttgctttgaggtactgttgtttgacattttgctttttgtgcactgtgatcctggggaagggtagtcttttgtcttcagctaagtagtttactgaccattttcttctggaaacaataacatgtctctaagcattgtttcttgtgttgtgtgacattcaaatgtcatttttttgaatgaaaaatactttcccctttgtgttttggcaggttttgtaactatttatgaagaaatattttagctgagtactatataatttacaatcttaagaaattatcaagttggaaccaagaaatagcaaggaaatgtacaattttatcttctggcaaagggacatcattcctgtattatagtgtatgtaaatgcaccctgtaaatgttactttccattaaatatgggagggggactcaaatttcagaaaagctaccaagtcttgagtgctttgtagcctatgttgcatgtagcggactttaactgctccaaggagttgtgcaaacttttcattccataacagtcttttcacattggattttaaacaaagtggctctgggttataagatgtcattctctatatggcactttaaaggaagaaaagatatgtttctcattctaaaatatgcattataatttagcagtcccatttgtgattttgcatatttttaaaagtacttttaaagaagagcaatttccctttaaaaatgtgatggctcagtaccatgtcatgttgcctcctctgggcgctgtaagttaagctctacatagattaaattggagaaacgtgttaattgtgtggaatgaaaaaatacatatatttttggaaaagcatgatcatgcttgtctagaacacaaggtatggtatatacaatttgcagtgcagtgggcagaatacttctcacagctcaaagataacagtgatcacattcattccataggtagctttacgtgtggctacaacaaattttactagctttttcattgtctttccatgaaacgaagttgagaaaatgattttccctttgcaggttgcacacagttttgtttatgcatttccttaaaattaattgtagactccaggatacaaaccatagtaggcaatacaattttagaatgtaatatatagaggtatatttagcctcttttagaagtcagtggattgaatgtctttttattttaaattttacattcattaaggtgcctcgtttttgactttgtccattaacatttatccatatgcctttgcaataactagattgtgaaaagctaacaagtgttgtaacaataatccattgtttgaggtgcttgcagttgtcttaaaaattaaagtgttttggtttttttttttccagacattgc

SEQ ID NO: 37 - DNA, 4321 bp, Homo sapiens
gctcgctccctcgcttctccccctttccctcctccctgtcccctctccttccctcacctctttcctccccacctcccctcttctcggtttcctcccccatccccttgactctcccctcccagccctcgctctctcgctcgccctcagcgcggcccccgccatgacggaggcgggtgccggtgccgttgccgccgctgccgtcgcagggggggagtcgggttcccagaaagtagcttgatgagtgtccaaagtagcagtggaagtttggaggggccgccatcttggtcccagctctccacgtctccaaccccgggctcggcggcggcggccaggtccctgctgaatcacacgccgccatccgggaggcccagggaaggtgcaatggatgagcttcatagtctggatccaagaaggcaagagttattggaagctagatttactggagttgcaagtgggagcactggaagtacgggcagttgcagtgttggagctaaagcctcaacaaataacgaaagctctaatcacagttttggaagcttgggatctttaagtgacaaagaatcagagacaccggagaagaaacaatcggaatcatccaggggaagaaagagaaaagcagaaaaccagaatgaaagtagtcaggggttccccaacctcccggtcttccagtccttggcctattgggaaatgggtcgtacagcaggaggaaaaagtattgggggacgtggccacaaaattagcgactattttgaataccagggtggaaatggctcaagtccagtaagaggcatacctcctgcaatccgttctcctcaaaattcacattcacattccactccttcctcatctgttcgaccgaatagcccttctcctactgcattagcatttggggaccaccctattgtacaaccaaagcaattatcctttaaaattattcagactgatctcacaatgctgaaattagcagcattagaaagtaataaaatccaggacctggaaaagaaggagggacgtatagatgatttgctcagggctaactgtgatctcagacggcaaatagatgaacaacaaaaattacttgaaaaatacaaagaacgattaaataagtgcatatcaatgagcaagaaacttcttattgaaaagagtacacaagaaaagctgtcaagcagagagaagagtatgcaagatcgattacgcctcgggcactttacaacagttagacatggcgcttcatttactgaacaatggacagatggttttgcatttcagaatcttgtgaagcaacaagaatgggtgaatcagcaaagggaagatattgaaaggcaaaggaaacttctagccaaacgcaaacctcccacagctaataattctcaggcaccctctaccaattctgaaccaaaacaaaggaaaaacaaagcagtcaatggagcagagaatgatccctttgttagaccaaatttaccacaactgttgactttggcagaatatcatgaacaggaagaaattttcaaacttagactaggacatctcaaaaaggaagaggcagaaatccaggcagaacttgaacgtttggaaagagtcagaaatcttcacatacgtgagctgaaaagaataaacaatgaagataattcacagttcaaagatcacccaacattaaatgaaagatatttattacttcatctgcttggtagaggtggctttagtgaagtgtataaggcttttgacctttatgaacaaagatatgctgctgtgaagatacatcagcttaataaaagctggagagatgagaagaaagaaaactaccacaaacatgcctgcagagagtatagaatacacaaagaactggatcaccccagaatagttaaactctatgattatttctccttggatacagatacgttttgtacagtgttagaatactgtgaaggcaatgacttggatttctatctgaagcaacacaagttaatgtcagagaaagaagctcggtctattgtaatgcagattgtaaatgcactaagatatctcaatgagatcaaaccccctattatacattatgatcttaagccaggaaacatcctactggtagatggaacagcatgtggtgaaatcaaaatcactgattttggtctgtccaagattatggatgatgatagctatggtgtagatggaatggatctaacttcccagggggcaggcacttactggtatttacctcctgagtgttttgtagttggaaaagagccaccaaagatttccaacaaggttgatgtatggtcggttggagtcatcttctttcagtgtctttatggtagaaagccatttggtcacaatcaatctcaacaagacattcttcaagaaaatacaatattaaaagccacagaagtccagttccctgtaaaaccggttgtaagcagtgaagccaaggcatttataagacgctgtttggcatatcgaaaagaagatcgatttgatgtgcaccagctggcaaatgacccataccttctcccacacatgagaagatcaaattcttcaggaaacctacacatggctgggctgacagcatcccctacacccccttcttcaagcataattacttactgactttcctccaagattggcatgatatctttgaatttgcttccagatgcacacttaagtttgagagcatttgagtgtttgttttctttttcttttttttttttttttttttttacacaagacgtggttaagaactgtttgtgaactgaagttcctcatagtgtcatttgtatgagagaggatcatggacaatgaataaatgcacacttctgactataattttgagcagtgaaggaaggatgactgcctgttacacagaaacaggaataccatgttaagatagaggaaaaaaattttgtttatttgggggaacactgtaaataacgtttataatacttaaatacatttggttgttactagagagttctaatatgaagggtagtttttcattatttaaaaacacatggaaaaatatgagacatatttctaacatacgaactatagtgcctggatacattcttcagcatttggcagttaatctgctgaaaccaaagtaagaactgaatgacagtgacagttgtgttttatagtaatagaatgtgagagttagaatctttggacaaagttaggctttgtcatttgcctattcagacttttaccaagttgtacctcgagatcacatgtccgttttctttcactggttatattaaagggagagctattatttctaaatactttacacctttgacaaaatgagctgcttgtgttgaaatcagttgaattcactaaattataatattgccagtgttttcaacacgttagaattgataacaggtatttttcttttgttaccaggccttgttcatcaaaacaggtgacagtgagtaaccaaatgcagaccagttctatgcaggataatgataaattcccttctagctctattgtaaattgttgtacagatgtcatatttcaattactaagtttcagcagcttattcttgtacaaatgtttaaaatatggcttttctaattggatattgtattttttttaagtcttcttgaaggcactctaattgctgctaaatgatgttgcttctttgctaaaaaattaaatgacctagaaggtgcaagttgactgtacatcatagatattaaaaagcagacagtcattaacaatcaagatgtaaaagtgatccatgttggacataattgagtttttaaatcagtttattgggttctagggctgtagaacacatagatactagatttttaatttgttcatggttattctacatttctagaaagttcttatcagcaagatggtcccataagcaaatttcttgtggtttgtacagatttgttaaaatgtgaacgttttctaactgcctcgtagggtagaaaccaatatttttcaggatgctgtatttcactcctgtaaggactttttctttattgtcacattcataatgctgatacttacatgtaagttgttcatgttgcagaaaaaggttatacgtaccacggattctctttaatattgtacagttaaactgtatttctgatgttgcaagccattttgttttttcattgtacatagacacattgtctctttaaaatgctgctgaaattgtagagagtatagccaaaacagtaataaacaatgacagttaaaatgtaaagactatgaaaattacattggaagggagctttcaagatggtaggatattgactaactgagctccttcacttaaaaatcagctgaataaattccttaagtatacttc

SEQ ID NO: 38 - DNA, 2285 bp, Homo sapiens
gcggtccctcccggcccggcggaacgcgtcccttttaagggggcggggacctgggggtctggggccagcgcgcgggagggacgcctgagtgcctcgagggcgccgttcgggcggggaggatcccgcgggtcccactgacccacgcggggtggggccaggggtggacgctcgcccgtacgcggtcgctactgatcatgcttgggccagggtccaatcgcaggcgccccacgcagggggagcgaggcccagggtcccccggagagcccatggagaagtaccaggttttgtaccagctgaatcctggggccttgggggtgaacctggtggtggaggaaatggaaaccaaagtcaagcatgtgataaagcaggtggaatgcatggatgaccattacgccagtcaggccctggaggagctgatgccactgctgaagctgcggcacgcccacatctctgtgtaccaggagctgttcatcacgtggaatggggagatctcttctctgtacctctgcctggtgatggagttcaatgagctcagcttccaggaggtcattgaggataagaggaaggcaaagaaaatcattgactctgagtggatgcagaatgtgctgggccaggtgctggacgcgctggaatacctgcaccatttggacatcatccacaggaatctcaaaccctccaacatcatcctcatcagcagtgaccactgcaaactgcaggacctgagttccaatgtgctaatgacagacaaagccaaatggaatattcgtgcggaggaagacccctttcgtaagtcctggatggcccctgaagccctcaacttctccttcagccagaaatcagacatctggtccctgggctgcatcattctggacatgaccagctgctccttcatggatggcacagaagccatgcatctgcggaagtccctccgccagagcccaggcagcctgaaggccgtcctgaagacaatggaggagaagcagatcccggatgtggaaaccttcaggaatcttctgcccttgatgctccagatcgacccctcggatcgaataacgataaaggacgtggtgcacatcaccttcttgagaggctccttcaagtcctcgtgcgtctctctgaccctgcaccggcagatggtgcctgcgtccatcaccgacatgctgttagaaggcaacgtggccagcattttaggtgatgctggggacacaaagggggagcgtgccctgaagctcctgtccatggccttggcatcctattgtttagttccagagggttcattatttatgcccctggccttgctccacatgcacgaccagtggctcagctgtgaccaggacagagtccctgggaagagagactttgcctccctggggaaactagggaagctgttgggccccatcccaaagggtctgccgtggcccccggagctggtggaggtggtggtcacgaccatggagctacatgacagggtcctcgatgtccagctgtgtgcctgctccctgctgctgcacctcctgggccaaggtatcattgtgaacaaggcccccttggagaaggtcccggacctcatcagccaggtgttggccacctaccctgcggatggggaaatggcagaagccagctgcggagtcttctggctgctgtccctgctgggctgcatcaaggagcagcagtttgaacaagtggtggcgctgctcctgcaaagcatccggctgtgccaggacagagccctgctggtgaacaatgcctaccggggactggccagcctggtgaaggtgtcagagctggcggccttcaaggtggtggtgcaggaggagggcggcagtggcctcagcctcatcaaggagacctaccagctccacagggacgacccggaggtggtggagaacgtgggcatgctgctggtccacctggcttcctatgaggagatcctgccggagctggtgtccagtagtatgaaggccctgctccaggagatcaaggagcgcttcacctccagcctggaactggtttcttgcgcggaaaaagtgctcttgaggctggaggcagccacctctcccagcccactgggtggggaagcagctcagccctgatgcgggggagaagacagataccccacaggcccctccctccacgtgtgccctctccctgtccttcctttccatgggccactgtttcccttggggtggggggaagggtcatccagcaccagaatgcgcacctcacactcctcttaggtgactaataaagaggcccaaggccagtttctgccttaaaaaaaaaaa

SEQ ID NO: 39 - DNA, 7364 bp, Homo sapiens
gcggcgcactgcggtttggtttgtttgcaacggcagtgacggaggttgggagccaggctgactgcaggcgggggcgtcaggaggcggattcctcctcccttcggcactggggggcggggaggagggaggccgggcctgcggccggggaccgagccgcaaagacagagcgggcagaggcgatggagggcgacggggtgccatggggcagcgagcccgtctcgggtcccggccccggcggcggcggaatgatccgcgagctgtgccggggcttcggccgctaccgccgctacctgggacggctgcgacagaacctgcgcgagacccagaagttcttccgcgacatcaagtgctcccacaaccacacttgtctctcctccctcacgggcggcggcggggccgagcgcggccctgcaggcgatgtcgccgaaaccgggctgcaggcgggccaactgagctgcatttccttcccacctaaggaagagaagtacctccagcagattgtggactgcctcccttgcatactgatcctcggccaggattgtaacgtcaagtgccagctgttgaatctgctgttgggggtgcaggtgcttcccaccaccaagctgggcagtgaggagagctgtaagcttcggcgcctccgcttcacctatgggactcagactcgggtcagcctggcgctccctggacagtatgaactagtgcacacgctggttgctcatcagggcaactgggagaccatccctgaggaggatctggaggtccaagagaacaatgaggatgctgctcatgttttagcggaactggaggtaacgatgcaccatgctctcttacaggaagtggacgttgtggtagcaccatgccaaggcctccggcccacagtggatgttctgggtgacttggtgaatgatttcttgcctgtgataacctatgcactccacaaagatgaactctctgagagggatgagcaagagcttcaggaaatccgaaagtatttctcctttcctgtattctttttcaaagtgccgaaactgggctcggagataatagactcctcaaccaggagaatggagagcgaaagatcaccgctttatcgccagctaattgacctgggctatctgagcagcagtcactggaactgtggggctcctggccaggatactaaagctcagagcatgttggtggaacagagtgaaaagctgagacacttgagcacattttctcaccaggtgttacagactcgcctggtggatgcagccaaggccctgaacctggtgcactgccactgccttgacatctttattaaccaggcatttgacatgcagcgggacctgcagatcactcccaaacgtctggaatatactcgaaaaaaggagaatgagttgtatgaatcattgatgaatattgccaaccgaaagcaggaggaaatgaaggatatgattgttgagacacttaataccatgaaggaggaacttctggatgatgctactaacatggagtttaaagacgtcattgtccctgagaatggagaaccagtaggcaccagagagatcaaatgctgcatccgacagatccaggaactcatcatctcccgacttaatcaggcagtggctaataagctgatcagctcagtggattacctgagggaaagcttcgtcggaaccctggaacgatgtctgcagagcctggagaagtctcaggatgtctcagttcacatcaccagtaattatctcaaacagatcttaaatgctgcctatcatgttgaagtcacgtttcactcagggtcgtcagttacaaggatgctatgggagcaaatcaaacagatcatccagcgcatcacatgggtgagcccacctgccatcactctggaatggaagaggaaggtggcccaggaagccattgagagcctcagcgcctccaaattggctaagagcatttgcagccaattccggactcggctcaatagttcccacgaggcttttgcagcctccttgcggcagctggaagctggccactcaggccggttagagaaaacggaagatctatggctgagggttcggaaagatcatgctccccgcctggcccgcctttctctggaaagccgttctttacaggatgtcttgcttcatcgtaaacctaaactgggacaggaactgggccggggccagtatggtgtggtatacctgtgtgacaactggggaggacactttccttgtgccctcaaatcagttgtccctccagatgagaagcactggaatgatctggctttggaatttcactatatgaggtctctgccgaagcatgagcgattggtggatctccatggttcagtcattgactacaactatggtggtggctccagcattgctgtgctcctcattatggagcggctacaccgggatctctacacagggctgaaggctgggctgaccctggagacacgtttgcagatagcactagatgtggtggagggaatccgcttcctgcacagccagggacttgtccatcgtgatatcaaactgaaaaatgtgctgctggataagcagaaccgtgccaagatcactgacttaggattctgcaagccagaggccatgatgtcaggcagcattgtggggacaccaatccatatggcccctgaacttttcacagggaagtacgataattccgtggatgtctacgcttttggaattcttttctggtatatctgctcaggctctgtcaagctccctgaggcatttgagaggtgtgctagcaaagaccatctctggaacaatgtgcggaggggggctcgcccagaacgtcttcctgtgtttgatgaggagtgctggcagttgatggaagcctgttgggatggcgaccccttgaagaggcctctcttgggcattgtccagcccatgctccagggcatcatgaatcggctctgcaagtccaattctgagcagccaaacagaggactagatgattctacttgaaagccaagacctttctctttcactctctagttatttccttccccctcaccttttggccatggggagaatttgacatttattcactataggacacactcccaagggaactggtgcttgctgggaaacttggaacccttcccaggcagggatgactcctggacagtgaagagttgaatgactgagcatattcagcagctcactgaagcgcccagctatccctttagcaaaaaagtgtctcagatgtgtaaaagctgaggaatgtggtgttctggcttcacaaatgaaaaggaggcagatgttaccattgtcttttcactgtatatacttctaagacagcaagcgggacactgcagtggcaatagtgttaaaaaatctcattctcatgatttttggctctagctaggaatagtttagtcaggactcagaaaatttgagcttagttctgggattatgaaaacatggggacaaaaacaataacttgtggatgtctggttcctgctgtctgcagccaggtatctcaggttgcaatggtcagaagtcccagtgagggagctagaaacagagctatctgttcctcatagtgccagtgtgtttacatttataggaccacatatccctggtttctgggggagggtttcactgttacatcaccaagaggccctgaaaagaggaaaaaaaaaaaaaaagaggccaggcatggtggctcacgcctgtaatctcagcactttgggaggctgaggcgggcggatcacaaggtccagagttcaagagcagcctggccaacatggtgaaaccccgtctctactaaagatacaaaaaattagccgggcgtggtggtgcatgcctgtaatccaagatactcaggaggctgaggcaggagaatcgcttgaacctgggaggcggaggttgcagtgagccgagatcatgccattgcactccagcctgggtgacagagtgagactctgtctcaaaaaaaaaaaaaaatagaatgtgtatgcatatatttgtgtgtatatgtatatatgtgtgtgtgtctatatctctatctatatagacatacacacaggagttattggatttagagttactgctaaccccagaacagaatctgttcttttacctttgagtcttttcttttgtttacctcttttcatctcaaagtgggaaagctccagataacatggtacttaggagtgagtgtctaagcaaaaccaacccaatgcgaagtatttgggtgagaactgagaggtgggagatgattggaggccatggcctatgtacaaacatactggaagaaaaccagcttgtttttaaaacttaacacaatcagaaatttttctttttgtgtttgaatctaacacactgacgtttggaaaacttgatcaatgagcttttaaccacgatttctcccgcaatttgttccttctttttacctttttaaaaatctgttagaagaaaaaaagcagcagacgaaagagaaaaaccctcctctggtagttctgtgtgtgcccctcacccctgtgtgctagtgtctgtgaagtttccctgaaaggtgggaggcgggtgggtggtcttttggagggttcctcatgaagtgtgcttgaggaaagaaattctgattctaggcagaggaaggggaacaatttaaatattggtgcatctcagatgcacttgacttcaagccttcctcaaccaaactggtccattagattccgaaaaacaggtagacgaggaagtagacagtggaagtgagtagtctccctccatctgcctaatccccaataactgtggtctggcccctgtgttcagccccagagtttgtaaaacaggtccccaggtaggtgtataagatgagttgcaaattagccgggcatgctggcacgcaccagtaatcccagctacttgggaggctgaggcaggagaatcacttgaacccgagaggcagaggtcatggtgagccgagatcacgccactgcactccagcctgggcaacagagcgagactctatcaaaaaaaaaaaacaaaaaaaaaaaacaaaaaacaaagatgagtcgcacatctgctgctgggattttctagggttgtctatgacagaatgaccatcttttaaatattaatggagtataaatggagtctataatgggtctttcatataacttttaactctttggctatcctgggctctgatcatgatatgtttgagcatagtagctccctaaactcttggagcctttcagaaattccatgtagtgctaataacctttttacttgcaaatgataaagtaactgactcagtgtctttgggctctgcaggctttagccttgttttggtaggatgttcagtatattctcagaatttttaccacctatttagctatacttcaagtactctattctctgcactaacttactgtccttctgggaactatgatggggcttcaagggagtcaggtgtcaagaaaggaggggtaagtactctctacttgctggaaaatcattgtaagtctgttgtgtatgaaattttaggaaaagtcttatatagttccctttccagactgttttcttttgactctaactataatcataagtctgtgcttccattatgaaggtcacattcctagcattcttgggaagtattagctcatactctcattcacatatgggaggttagatttttttcctctacccagagtccctttttagtttaccccacggcttagtttgctgtcagataccagttctctagcagattccccaacagttttttccccagtggggagggtggaagggagggactgatataagtaaggagatgagtagttgtgttacagttcattttctttaaaaaaaagtactttgagaaaaggtgcaaaatattcttgaaagtctctaggccagccaaagtccacatatggatatttggggatgttatttaaatactcagcaggctgagtgcaggtatacgtgtgtatagagtgtgtatactttgcttttgttttataacattgtcagctaattttggctttgttctttggcatccattcttattataagtgatggaatgccatgaaatgtactgtattgtatattacttgggaggacactaggttttcaaagaagtctggcagcacttgggttatagagggctcagcatgaccaaagtcctaaagattttacctcccagctttggttgtatgtgttcccaagtggtgaggtgagattgtggctggaggaagaaaaaggatggcatgaaagaatgacccttattgtggtctgtccttctaatcaacataattagggcagcttaccccaacatgaaaatgatgacctggccatttttaatggccagagcttgaagtctggtctctcattttgtttcagaaatgagtgagaggccttcctgcagagcagtcaggagaaatggtggagcctggggccctggaatggctgaccctgtgcctagagagctgatggcaagggctgtctggcatggctcatttgggtggggtttccccaggcataccttagttccctgatcctctgcaaagagtagctcattgactgagcaagcgcttcaggaggactgtgctggttgttcccagaccaaagagagtcacttttgactccatcaacttcaaggggacagagcctaggcagcagattctcctaatttttaacactaaaattcaaggaagcagtggaggaaagaatgcattactaccacagatagaaataggggactcatagaactctcgactagtacctgtcagctctcagatgcattcttgtgtctttgcttgagctgccaaagaagggtcacaaagtgttcttcctcatggaagaagtgcctcggggttgcagggctgcaaagtgacaactgcactgaatgacactttattttttggctttggcttattatttagcactgggaggcccaggggaattggtgattacagtagcactttgggaagttaaagccccctttgggcttgctttggagagatgatggcatgcttggtattccatttggataatcaggaagcctccctagtccatccatattgtgtcagagtgggattaacaaccctggaagagtccactgccaaaagagtagttgctttcctggaatttccaaagcttttggattttctggatcaagtaacccactttttaaaacctgaggtcaggagttcgagaccagcctggtaacatggtgaaaccccgtctctattaaaaatagaaaaaattagccaggcatggtggcgggcacctatagtcccagctactcaggaggctgaggtaggagaattgcttgaacccaggagacagaggctgcattgagccaagatcacaccactgcactccagcctgggcagcagagcaagactccatctc

SEQ ID NO: 40 - DNA, 1971 bp, Homo sapiens
catgacaagctaacagagagagcggagagtcacaatccaaggtccggctcctccgcgtcccagggccggacggagggatgaggcagggggggcccgggcagcgccgttgctgctccccccgccgcccgcagccatggaaacggggaaggacggcgcccgcagaggtacacaaagcccggagcggaaaaggcgaagcccagtgccgcgggcgcccagcacgaagctgaggccggcggcggcggcccgggccatggatccggtggcggccgaggccccgggcgaggccttcctggcgcggcgacggcctgagggcggtggcgggtccgcgcggccgcgttacagcctgttggcggagatcgggcgcggcagctacggcgtggtttatgaggcagtggccgggcgcagcggggcccgggtggcggtcaagaagatccgctgcgacgcccccgagaacgtggagctggcgctggctgaattctgggccctcaccagcctcaagcggcgccaccagaacgtcgtgcagtttgaggagtgcgtcctgcagcgcaatgggttagcccagcgcatgagtcacggcaacaagagctcgcagctttacctgcgcctggtggagacctcgctgaaaggagaaaggatcctgggttatgctgaggagccctgctatctctggtttgtcatggagttctgtgaaggtggagacctgaatcagtatgtcctgtcccggaggccagacccagccaccaacaaaagtttcatgctacagctgacgagcgccattgccttcctgcacaaaaaccatattgtgcacagggacctgaagccagacaacatcctcatcacagagcggtctggcacccccatcctcaaagtggccgactttggactaagcaaggtctgtgctgggctggcaccccgaggcaaagagggcaatcaagacaacaaaaatgtgaatgtgaataagtactggctgtcctcagcctgcggttcggacttctacatggctcctgaagtctgggagggacactacacagccaaggcggacatctttgccctgggcattatcatctgggcaatgatagaaagaatcacttttattgactctgagaccaagaaggagctcctggggacctacattaaacaggggactgagatcgtccctgttggtgaggcgctgctagaaaacccaaagatggagttgcacatcccccaaaaacgcaggacttccatgtctgaggggatcaagcagctcttgaaagatatgttagctgctaacccacaggaccggcctgatgcctttgaacttgaaaccagaatggaccaggtcacatgtgctgcttaaaattcagggctaagcattttgggtgattttaaactaggtcgattcctcgggacccacagtctcaccacgtctcctccagaggacggcagagggtacaggtggtggcctggccggttggcgatctcccgacagctggatccggcaatgtgaagcttttgtttgggtttccccgcttctttttagttttgctttatttttttccttttcttttttttttttttttctctttcctttttttaaatttaaaccattgagacttcagaagagcaggacacaatgctgtggacaggcaccaatttctttaaagaaattcaatgtgggcaaggcatatgtgtaaatttcacttttactttttataaggggttagggagctatttttggttttgtccttcactttccctctgtcttccttctttatacttttctcagttctacttatgacacctcacttccctagagaaggcctgcctccccatagggaatctgggggtttcttctggaacggggcgtgaggacacaaggaggcctctgggccacgcctccctaccagatgcaggaactcctggactccttggtgggctggccctggctagcccttgggcctcggagatgatcagaggtgaagaaccgcc

SEQ ID NO: 41 - DNA, 1704 bp, Homo sapiens
atggatgacaaagatattgacaaagaactaaggcagaaattaaacttttcctattgtgaggagactgagattgaagggcagaagaaagtagaagaaagcagggaggcttcgagccaaaccccagagaagggtgaagtgcaggattcagaggcaaagggtacaccaccttggactccccttagcaacgtgcatgagctcgacacatcttcggaaaaagacaaagaaagtccagatcagattttgaggactccagtgtcacaccctctcaaatgtcctgagacaccagcccaaccagacagcaggagcaagctgctgcccagtgacagcccctctactcccaaaaccatgctgagccggttggtgatttctccaacagggaagcttccttccagaggccctaagcatttgaagctcacacctgctcccctcaaggatgagatgacctcattggctctggtcaatattaatcccttcactccagagtcctataaaaaattatttcttcaatctggtggcaagaggaaaataagaggagatcttgaggaagctggtccagaggaaggcaagggagggctgcctgccaagagatgtgttttacgagaaaccaacatggcttcccgctatgaaaaagaattcttggaggttgaaaaaattggggttggcgaatttggtacagtctacaagtgcattaagaggctggatggatgtgtttatgcaataaagcgctctatgaaaacttttacagaattatcaaatgagaattcggctttgcatgaagtttatgctcacgcagtgcttgggcatcacccccatgtggtacgttactattcctcatgggcagaagatgaccacatgatcattcagaatgaatactgcaatggtgggagtttgcaagctgctatatctgaaaacactaagtctggcaatcattttgaagagccaaaactcaaggacatccttctacagatttcccttggccttaattacatccacaactctagcatggtacacctggacatcaaacctagtaatatattcatttgtcacaagatgcaaagtgaatcctctggagtcatagaagaagttgaaaatgaagctgattggtttctctctgccaatgtgatgtataaaattggtgacctgggccacgcaacatcaataaacaaacccaaagtggaagaaggagatagtcgcttcctggctaatgagattttgcaagaggattaccggcaccttcccaaagcagacatatttgccttgggattaacaattgcagtggctgcaggagcagagtcattgcccaccaatggtgctgcatggcaccatatccgcaagggtaactttccggacgttcctcaggagctctcagaaagcttttccagtctgctcaagaacatgatccaacctgatgccgaacagagaccttctgcagcagctctggccagaaatacagttctccggccttccctgggaaaaacagaagagctccaacagcagctgaatttggaaaagttcaagactgccacactggaaagggaactgagagaagcccagcaggcccagtcaccccagggatatacccatcatggtgacactggggtctctgggacccacacaggatcaagaagcacaaaacgcctggtgggaggaaagagtgcaaggtcttcaagctttacctcaggagagcgtgagcctctgcattaa

SEQ ID NO: 42 - DNA, 7981 bp, Homo sapiens
cacgcgtaagcttgggcccctcgagggatcctctagagcggccgccgagacgtccccggcacgctgatggagcccgggcgcggcgcggggcccgcgggcatggcggagcctcgggcgaaggcggcgcggccggggccccagcgctttctgcggcgcagcgtggtagagtcggaccaggaggagccgccgggcttggaggcagccgaggcgccgggcccgcagcccccgcagcccctgcagcgccgggtgcttctgctctgcaagacgcgccgcctcatcgcggagcgcgcccgcggacgccccgccgcccccgcgcccgcagcgctggtagcgcagccgggagcccccggagcccccgcggacgccggccccgagcccgtgggcacgcaggagcccggcccggaccccatcgcagccgctgtcgaaaccgcgcctgcccccgacggcggccccagggaggaggcggcggcgaccgtgaggaaggaggatgagggggcggccgaggcgaagcctgagcccgggcgcactcgccgggacgagcccgaagaggaggaggacgacgaggacgacctcaaggccgtggccacctctctggacggccgcttcctcaagttcgacatcgagctgggccgcggttccttcaagacggtctacaaggggctggacacggagacctgggtggaggtggcctggtgtgagctgcaggaccggaagctcaccaagctggagcggcagcggttcaaggaagaggctgagatgctgaaaggcctgcagcaccccaacatcgtgcgcttctacgacttctgggagtccagcgccaagggcaagcggtgcattgtgctggtgacggagctgatgacctcagggacgctgaagacatacctgaagcggttcaaggtgatgaagcccaaggttctccgcagctggtgccggcagatcctgaagggcctgctgttcctgcacacaaggacgccacccatcatccaccgagacctgaaatgtgacaatattttcatcaccggaccaactgggtccgtgaagattggcgacttgggcctggccactctgaaaagagcgtcatttgccaaaagtgtgataggtactcccgagttcatggcgcccgagatgtacgaggagcactacgatgagtccgtggacgtctatgcctttgggatgtgcatgctggagatggccacctcggagtacccctactcggagtgccagaatgcggcccagatctaccgcaaggtcacctgtggtatcaagccggccagctttgagaaagtgcacgatcctgaaatcaaggagattattggggagtgtatctgcaaaaacaaggaggaaaggtacgagatcaaagacctgctgagccacgccttcttcgcagaggacacaggcgtgagggtggagctcgcggaggaggaccacggcaggaagtccaccatcgccctgaggctctgggtggaagaccccaagaaactgaagggaaagcccaaggacaatggagccatagagttcaccttcgacctggagaaggagacgccggatgaggtggcccaagagatgattgagtctggattcttccacgagagtgacgtcaagatcgtggccaagtccatccgtgaccgcgtggccttgatccagtggcggcgggagaggatctggcccgcgctgcagcccaaggagcagcaggatgtgggcagcccggacaaggccaggggtccgccggtgcccctgcaggtccaggtgacctaccatgcacaggctgggcagcccgggccaccagagcccgaggagccggaggccgaccagcacctcctgccacctacgttgccgaccagcgccacctccctggcctcggacagcaccttcgacagcggccagggctctaccgtgtactcagactcgcagagcagccagcagagcgtgatgcttggctcccttgccgatgcagcgccgtccccggcccagtgtgtgtgcagcccccctgtgagcgaggggcccgtcctgccgcagagcctgccctcgctgggggcctaccagcagcccacggctgcacctggcttgccggtgggctctgtcccggcccccgcctgccctccgtccctccagcagcacttcccggatccggccatgagcttcgcccccgtgctgccgccgcccagcacccccatgcccacgggcccaggccagccagcaccccccggccagcagcctcctccgctggcccagccgacacccctgccgcaggtcctggccccacagcccgtggtccccctccagccggttcccccccacctgccaccgtacctggctccagcctcccaggtgggggcccccgctcagctgaagcccctccagatgccacaggcgcccctgcagccgcttgctcaagtccctccgcagatgcccccgattcctgttgtgccccccatcacgcccctggcgggaatcgacggcctccctccggccctcccagacctgccgaccgcgactgtgcctcccgtgccaccacctcagtatttctctccagccgtgatcttgccgagcctcgctgccccactcccccctgcgtccccagccttgcctctgcaggctgtgaagctgccccacccccctggggcgcccctggccatgccctgccggaccattgtgccaaatgcaccggccactatccccctgctggccgtagccccaccgggcgtggctgccctgtccattcattctgccgtggcccagctcccaggccaacctgtgtacccagcggccttcccacagatggcgcctactgacgtccctccttccccccatcacacggtgcagaatatgagggccacccctccacagccggcactgcctccacaacccacactgcccccacaacccgtgctgcccccgcaacccacgctgccccctcaacctgtgttgcccccgcaacccacacggccccctcaacctgtgctgcccccgcaacccatgctgcccccacaacctgtgctgcccccgcagccggcactgcctgtgcgccctgagcccctccagccccaccttcctgaacaagctgctccagctgctacaccagggagccagattctgcttggccacccagctccctatgctgtggacgtcgccgctcaggtccccaccgtgcctgtgccaccggctgcggtcctctcgccgcctctgccggaagtgctgctgcctgccgcccctgagctcctgcctcagttccccagctccctggccacggtgtctgcctctgtgcagagtgtgcccacccagactgccacacttctgccaccagcaaacccaccgctgcctggcgggcccgggatcgccagcccttgcccaactgtccagctgacggtggaaccagtccaagaggagcaggcctcacaggacaagccgcccggcctcccgcagagctgtgagagctatggaggttctgatgtcacttctggaaaagagctgagtgacagctgtgaaggcgcctttggagggggcaggctggagggcagggcagcccgaaaacaccaccgcaggtccacgcgtgcgcgctcccggcaggagagggccagccggccccggcttaccatcttgaacgtgtgcaacactggggacaagatggtggagtgccagctggagacgcacaaccacaagatggtgaccttcaagttcgacttggacggggacgcacccgatgaaattgccacgtatatggtggagcatgactttatcctgcaggccgagcgggaaacgttcatcgagcagatgaaggatgtcatggacaaggcagaggacatgctcagcgaggacacagacgccgaccgtggctccgacccagggaccagcccgccacacctcagcacctgcggcctgggcaccggggaggagagccgacaatcccaagccaacgcccccgtgtatcagcagaacgtcctgcacaccgggaagaggtggttcatcatctgtccggtggctgagcaccccgcccccgaggcccctgaatcttcgcccccacttcctctaagctccctgccgccagaagccagccaagattcagcgccctataaagaccagctgtcctcgaaggaacaacccagctttctagccagtcagcagctcctgagccaggcgggccccagcaaccctcctggggcacccccagcccctttggccccctcctcccctcctgtgactgctctgccccaagatggagcagctccagccaccagcaccatgccagagccagcgtcaggaactgccagccaggcagggggtccagggacacctcaggggctgaccagtgagctcgagacgtctcagccactagcggagactcacgaggccccgcttgctgtgcagcccctcgtggtgggcctagcaccttgcactccagctccagaggctgcctcaaccagggacgccagtgccccaagggagcccctgccacctcctgcacctgagcccagcccccacagcgggaccccacagcccgccttgggtcagcctgctcccctgcttcctgccgcagtgggggccgtcagcctggccacctcccagctcccaagcccacccctggggcccaccgtccccccacagccaccctcggccctggagtcggatggggaagggccgccccccagggtgggctttgtggacagcaccatcaagagcctggacgagaagctgcggactctgctctaccaggagcacgtgcccacctcctcagcctcagctgggacccctgtggaggtgggcgacagagacttcaccctggagcccctgagaggggaccagccccgctcagaggtctgcgggggggacctggccctgcccccagtgcctaaggaggcggtctcagggcgtgtccagctgccccagcccttggtggagaagtcagaactggcccccactcgaggggccgtgatggagcagggcacgtcctcgtcaatgacagagtcgtctcccaggagtatgctaggctatgacagagatggaaggcaggtggcctcagactcccatgtggtccccagcgtcccccaggatgtacctgcttttgtgagacctgcacgtgtggagcccacagacagggatggtggagaagctggagaaagctcggcagagcccccgccgagtgacatgggcacagtggggggccaggctagccacccccagacactcggcgctcgagctttggggtcccctcggaaacgtccagagcagcaggatgtcagctcaccagccaagactgtgggccgtttctcggtggtcagcactcaggacgagtggaccctggcctccccccacagcctgagatactctgccccacccgacgtctacctggacgaggccccctccagccccgacgtgaagctggcagtgcggcgggcgcagacggcctcctccatcgaggtcggcgtgggcgagcccgtgtccagcgactctggggacgagggccctcgggcgagacccccggtgcagaagcaggcgtccctgcccgtgagtggcagcgtggctggcgacttcgtgaagaaggccaccgccttcctgcagaggccttctcgggccggctcgctgggccccgagacacccagcagggtgggcatgaaggtccccacgatcagcgtgacctccttccattcccagtcgtcctacatcagcagcgacaatgattcggagctcgaggatgctgacataaagaaggagctgcagagtctgcgggagaagcacctgaaggagatctcggagctgcagagccagcagaagcaggagatcgaagctctgtaccgccgcctgggcaagccactgccccccaacgtgggcttcttccacacggcaccccccactggccgccggagaaaaaccagcaagagcaagctgaaggcaggcaagctgctaaatcccctggtgcggcagctcaaggtcgtggcctccagcacaggtcacttggctgactccagcagaggccctcccgctaaggaccctgcccaagccagtgtggggctcactgcagacagcacgggcctgagcgggaaggcagtgcagacccagcagccctgctccgtccgggcctccctgtcttcggacatctgctccggcttagccagtgatggaggcggagcgcgtggccaaggctggacggtttaccacccaacgtctgagagagtgacctataagtctagtagcaaacctcgtgctcgattcctcagtggacccgtatctgtgtccatctggtctgccctgaagcgtctctgcctaggcaaagaacacagcagtaggtcctccaccagcagcctggccccaggccctgagccaggcccccagcccgccctgcacgtccaggcgcaggtgaacaacagcaacaacaagaagggtaccttcacggacgacctgcacaagctggtggacgagtggacgagcaagacggtgggggccgcgcagctgaagcccacgctcaaccagctgaagcagacccagaagctgcaagacatggaggcccaggcaggctgggctgcccctggcgaggcgcgggctatgaccgcacctcgagcaggagtggggatgccacgtctgcccccagcgcccggccctctgtccaccacggtcattcccggagccgccccgaccctgtccgtgcccacaccagatggcgccctcggaaccgcccggagaaaccaggtgtggtttggcctccgagtcccccccaccgcctgctgtgggcacagcactcagccgcgagggggacagcgggtgggcagcaagactgcttcctttgcggcttcagaccctgttcgctcctaggttcctgtggtccacgcgccgtctccacacccacttcctatacttgagttgatggttagaaccttgtcgtcaccctgcagaagtacagtgccttgaatgccagcttttccgttccctgatgaaaagatatgttaaaaaaaattatcggaaaaggtttcatttgcaattggcttgtgcattgataatctttatttactgttttaagttgcagagatgtgaatggtttacaaatctgaagctgaagttcaatctttggttttctgttgtaaatgccttttacaaacattgaattagctaccttaagtattgaagagcttccattgctaggtgagccctgctttgtcctcagtagagtgccggttccctgggctcatccaggggctgagagacggcgggacgctggggcagggcacactggcggagctgcttgctcagtagggaatgtcagttgttgcgctgggccatgagaaatccgccagaaaacgttaggtgagcagacatgccccccatgccagtgggctgctgtgagtgaggataaggtgtgtgttgggcatagaaaccctggctgcccgcccaccctgtggagacaagtgcagctcctccagctggagaggctgccctctctcctgcccacttccctcccttctccatgatttccatggagacctgtggctctgctcacccctggcatgcagaccgctctcccgtccagccctaagcctgctctgcggagggcggggtcattcttctcctggagatttcagtgggactcgtccccagtgggcacaacacagcccttggtgggaggggaaggccccagcctcctccacctcccactggaaagcagactgcttgggactgcccagctgtgaattgtatagtttctgtacttattagaactgggtaaattattttggttcaaatctattattccatcaattcagttagaattgaattttctaggtgattatgcagaatcttctgccagggcacgatgctgtcgtaagagatttctgttctctgtactgggcccccttgccctgttccttgagtgaagtgggggctgccctcacctgtcccccttgcctgtgaatcccttccttgtacatggtggtcagtggcacggaatccccaatagattgtatatctgaaggagaaaaataaacacttttgctcg

SEQ ID NO: 43 - DNA, 7026 bp, Homo sapiens
  modified_base (6839)..(6839): a, c, g, t, unknown or other
  modified_base (6843)..(6844): a, c, g, t, unknown or other
atggcggcggcggcggggaatcgcgcctcgtcgtcgggattcccgggcgccagggctacgagccctgaggcaggcggcggcggaggagccctcaaggcgagcagcgcgcccgcggctgccgcgggactgctgcgggaggcgggcagcgggggccgcgagcgggcggactggcggcggcggcagctgcgcaaagtgcggagtgtggagctggaccagctgcctgagcagccgctcttccttgccgcctcaccgccggcctcctcgacttccccgtcgccggagcccgcggacgcagcggggagtgggaccggcttccagcctgtggcggtgccgccgccccacggagccgcgagccgccgcggcgcccaccttaccgagtcggtggcggcgccggacagcggcgcctcgagtcccgcagcggccgagcccggggagaagcgggcgcccgccgccgagccgtctcctgcagcggcccccgccggtcgtgagatggagaataaagaaactctcaaagggttgcacaagatggatgatcgtccagaggaacgaatgatcagggagaaactgaaggcaacctgtatgccagcctggaagcacgaatggttggaaaggagaaataggcgagggcctgtggtggtaaaaccaatcccagttaaaggagatggatctgaaatgaatcacttagcagctgagtctccaggagaggtccaggcaagtgcggcttcaccagcttccaaaggccgacgcagtccttctcctggcaactccccatcaggtcgcacagtgaaatcagaatctccaggagtaaggagaaaaagagtttccccagtgccttttcagagtggcagaatcacaccaccccgaagagccccttcaccagatggcttctcaccatatagccctgaggaaacaaaccgccgtgttaacaaagtgatgcgggccagactgtacttactgcagcagatagggcctaactctttcctgattggaggagacagcccagacaataaataccgggtgtttattgggcctcagaactgcagctgtgcacgtggaacattctgtattcatctgctatttgtgatgctccgggtgtttcaactagaaccttcagacccaatgttatggagaaaaactttaaagaattttgaggttgagagtttgttccagaaatatcacagtaggcgtagctcaaggatcaaagctccatctcgtaacaccatccagaagtttgtttcacgcatgtcaaattctcatacattgtcatcatctagtacttctacatctagttcagaaaacagcataaaggatgaagaggaacagatgtgtcctatttgcttgttgggcatgcttgatgaagaaagtcttacagtgtgtgaagacggctgcaggaacaagctgcaccaccactgcatgtcaatttgggcagaagagtgtagaagaaatagagaacctttaatatgtcccctttgtagatctaagtggagatctcatgatttctacagccacgagttgtcaagtcctgtggattccccttcttccctcagagctgcacagcagcaaaccgtacagcagcagcctttggctggatcacgaaggaatcaagagagcaattttaaccttactcattatggaactcagcaaatccctcctgcttacaaagatttagctgagccatggattcaggtgtttggaatggaactcgttggctgcttattttctagaaactggaatgtgagagagatggccctcaggcgtctttcccatgatgtcagtggggccctgctgttggcaaatggggagagcactggaaattctgggggcagcagtggaagcagcccgagtgggggagccaccagtgggtcttcccagaccagtatctcaggagatgtggtggaggcatgctgcagcgttctgtcaatggtctgtgctgaccctgtctacaaagtgtacgttgctgctttaaaaacattgagagccatgctggtatatactccttgccacagtttagcggaaagaatcaaacttcagagacttctccagccagttgtagacaccatcctagtcaaatgtgcagatgccaatagccgcacaagtcagctgtccatatcaacactgttggaactgtgcaaaggccaagcaggagagttggcagttggcagagaaatactaaaagctggatccattggtattggtggtgttgattatgtcttaaattgtattcttggaaaccaaactgaatcaaacaattggcaagaacttcttggccgcctttgtcttatagatagactgttgttggaatttcctgctgaattttatcctcatattgtcagtactgatgtttcacaagctgagcctgttgaaatcaggtataagaagctgctgtccctcttaacctttgctttgcagtccattaataattcccactcaatggttggcaaactttccagaaggatctacttgagttctgcaagaatggttactacagtaccccatgtgttttcaaaactgttagaaatgctgagtgtttccagttccactcacttcaccaggatgcgtcgccgtttgatggctattgcagatgaggtggaaattgccgaagccatccagttgggcgtagaagacactttggatggtcaacaggacagcttcttgcaggcatctgttcccaacaactatctggaaaccacagagaacagttcccctgagtgcacaatccatttagagaaaactggaaaaggattatgtgctacaaaattgagtgccagttcagaggacatttctgagagactggccagcatttcagtaggaccttctagttcaacaacaacaacaacaacaacagagcaaccaaagccaatggttcaaacaaaaggcagaccccacagtcagtgtttgaactcctctcctttatctcatcattcccaattaatgtttccagccttgtcaaccccttcttcttctaccccatctgtaccagctggcactgcaacagatgtctctaagcatagacttcagggattcattccctgcagaataccttctgcatctcctcaaacacagcgcaagttttctctacaattccacagaaactgtcctgaaaacaaagactcagataaactttccccagtctttactcagtcaagacccttgccctccagtaacatacacaggccaaagccatctcgacctaccccaggtaatacaagtaaacagggagatccctcaaaaaatagcatgacacttgatctgaacagtagttccaaatgtgatgacagctttggctgtagcagcaatagtagtaatgctgttatacccagtgacgagacagtgttcaccccagtagaggagaaatgcagattagatgtcaatacagagctcaactccagtattgaggaccttcttgaagcatctatgccttcaagtgatacaacagtaacttttaagtcagaagttgctgtcctgtctcctgaaaaggctgaaaatgatgatacctacaaagatgatgtgaatcataatcaaaagtgcaaagagaagatggaagctgaagaagaagaagctttagcaattgccatggcaatgtcagcgtctcaggatgccctccccatagttcctcagctgcaggttgaaaatggagaagatatcatcattattcaacaggatacaccagagactctaccaggacataccaaagcaaaacaaccgtatagagaagacactgaatggctgaaaggtcaacagataggccttggagcattttcttcttgttatcaggctcaagatgtgggaactggaactttaatggctgttaaacaggtgacttatgtcagaaacacatcttctgagcaagaagaagtagtagaagcactaagagaagagataagaatgatgagccatctgaatcatccaaacatcattaggatgttgggagccacgtgtgagaagagcaattacaatctcttcattgaatggatggcagggggatcggtggctcatttgctgagtaaatatggagccttcaaagaatcagtagttattaactacactgaacagttactccgtggcctttcgtatctccatgaaaaccaaatcattcacagagatgtcaaaggtgccaatttgctaattgacagcactggtcagagactaagaattgcagattttggagctgcagccaggttggcatcaaaaggaactggtgcaggagagtttcagggacaattactggggacaattgcatttatggcacctgaggtactaagaggtcaacagtatggaaggagctgtgatgtatggagtgttggctgtgctattatagaaatggcttgtgcaaaaccaccatggaatgcagaaaaacactccaatcatcttgctttgatatttaagattgctagtgcaactactgctccatcgatcccttcacatttgtctcctggtttacgagatgtggctcttcgttgtttagaacttcaacctcaggacagacctccatcaagagagctactgaagcatccagtctttcgtactacatggtagccaattatgcagatcaactacagtagaaacaggatgctcaacaagagaaaaaaaacttgtggggaaccacattgatattctactggccatgatgccactgaacagctatgaacgaggccagtggggaacccttacctaagtatgtgattgacaaatcatgatctgtacctaagctcagtatgcaaaagcccaaactagtgcagaaactgtaaactgtgcctttcaaagaactggccctaggtgaacaggaaaacaatgaagtttgcatgactaaattgcagaagcataattttatttttttggagcactttttcagcaatattagcggctgaggggctcaggatctattttaatatttcaattattcttccatttcatatagtgatcacaagcagggggttctgcaattccgttcaaattttttgtcactggctataaaatcagtatctgcctcttttaggtcagagtatgctatgagtagcaatacatacatatatttttaaaagttgatacttctttatgacccacagttgacctttattttcttaaataccagggcagttgtggctcattgtgcattttactgttggcccattcatttcgtttttggaaattatggttttgtattttcatgtttatttacattcatttttgtttattcagggaaagctgatctttttttcaaaccagaaaaaaaaaatgaactagatatgaagtagagttcattaaatatcttgctattgtcagagtttttaaaatatagacttaattttgtttttttaaattggaatacaataaagtactacctacatttgagtcagtcaccactcttattgtgcaggttaagtacaagttaactaaaaataaactgtcctctctggtgcaactcacaaccaagatcaagattaccttaaaatttatttgaattttttagatgttttggttgtcaaactgtaggaaacttcacaacatttaagtcttactctgtatgtaacaatccatcattcaccttcactactggtaataacatagagctgccattttccttttaccatgcatcatctctttacagtaggcctggcagatcattttttaaaaagattattcaactaccaatcagtaatgtttttaaacagtacatttgctttgaacttggaaaatgtgttcagaaagaaaaatggaattgaatttcatttatacactaattccttggattttgcacagttacctaacggttttagtctggagttaaattcagatgcatggaatcctgaaggaaaatggtagctttttaatctttttgtgtgtgtgtgagtcttttaaatcaagtactgattaactattaagtacaactttgagattttagttttaactcttcagaagccagtgtgaaatagaattggttattctcaaagactcaggataaactaaataagctatatatagagtacatttaaaatgtacaacacaaattggaagtaaaataagttacaagataagtttacagggatatattgcttacaatttttaaaaggcagtttgttttttatgtgaatatgtttcttagtgaaattttacattcctttgttttggaagattggcgatatttgaagagttaaaaatagtacagaaatgtgaagtttggtatctctaaatgtgttgtacttgactttcttttttatttttttttattttttttgactacttagaattttcacaattctaataagattgtttccaagtctctcatgtgcaagctttaaaggatgcactcttgccattttatgtactggaagatcattggtcagatgaatactgtgtctgacaaaaatgtaaactgtataaactgaggaacctcagctaatcagtattactttgtagatcaccatgcccaccacatttcaaactcaaactatctgtagatttcaaaatccattgtgtttgagtttgtttgcagttccctcagcttgctggtaattgtggtgttttgttttttgttttgttttcaatgcaaatgtgatgtaatattcttattttctttggatcaaagctggactggaaattgtatcgtgtaattatttttgtgttcttaatgttatttggtactcaagttgtaaataacgtctactactgtttattccagtttctactacctcaggtgtcctatagatttttcttctaccaaagttcactttcacaatgaaattatatttgctgtgtgactatgattcctaagatttccagggcttaagggctaacttctattagcaccttactgtgtaagcaaatgttacaaaaaaaanaaannaaaaaaatctctgggttaagaaaatttggcttaaatgtatcctttgttattttaaatatattgagatattttaattaaaatttttaccccattgaaccgattttatagtatttgtacctattttggtgtttttgtctttatagtaaataaaagtttttgaacaaaaaaaaaagtcgacgcgg

SEQ ID NO: 44 - DNA, 2571 bp, Homo sapiens
atgccacagatagcaaagaagcaatcaactcaccggactcagaaacctaaaaagcaatcatttccttgcatctgtaaaaatccaggaacacagaagtcatgtgttcctctctctgttcaaccgacagagccaagactaaattacctagatcttaagtatagtgatatgttcaaagaaatcaattcaactgctaatggacctggaatctatgaaatgtttgggacccctgtttattgtcatgtgcgagagactgaaagggatgaaaacacgtattaccgtgagatatgttcggctccatcaggcagacgtatcaccaataaatgtcgatcttcacacagtgagaggaagagcaatatcagaacaagactttctcagaaaaaaacacatatgaaatgcccaaagacttcatttggcattaaacaagagcacaaagtcttaatttctaaagaaaagagttccaaggctgtacatagcaacctacatgacattgaaaatggtgatggtatttcagaaccagactggcagataaagtcttcaggaaatgagtttctatcttccaaagatgaaattcatcccatgaacttggctcagacacctgagcagtccatgaaacagaatgaattccctcctgtctcagatttatccattgttgaagaagtttctatggaagagtctactggtgatagagacatttctaacaatcaaatactcaccacaagcctcagagatctgcaagaacttgaagagctacatcaccagatcccatttatcccttcagaagacagctgggcagtgcccagtgagaagaattctaacaagtatgtacagcaagaaaagcagaatacagcatctcttagtaaagtaaatgccagccgaattttaactaatgatctagagtttgatagtgtttcagatcactctaaaacacttacaaatttctctttccaagcaaaacaagaaagtgcatcttcccagacatatcaatattgggtacattatttggatcatgatagtttagcaaataagtcaatcacatatcaaatgtttggaaaaaccttaagtggcacaaattcaatttcccaagaaattatggactctgtaaataatgaagaattgacagatgaactattaggttgtctagctgcagaattattagctcttgatgagaaagataacaactcttgccaaaaaatggcaaatgaaacagatcctgaaaacctaaatcttgtcctcagatggagaggaagtaccccaaaagaaatgggcagagagacaacaaaagtcaaaatacagaggcatagtagtgggctcaggatatatgacagggaggagaaatttctcatctcaaatgaaaagaagatattttctgaaaatagtttaaagtctgaagaacctatcctatggaccaagggtgagattcttggaaagggagcctacggcacagtatactgtggtctcactagtcaaggacagctaatagctgtaaaacaggtggctttggatacctctaataaattagctgctgaaaaggaataccggaaactacaggaagaagtagatttgctcaaagcactgaaacatgtcaacattgtggcctatttggggacatgcttgcaagagaacactgtgagcattttcatggagtttgttcctggtggctcaatctctagtattataaaccgttttgggccattgcctgagatggtgttctgtaaatatacgaaacaaatacttcaaggtgttgcttatctccatgagaactgtgtggtacatcgcgatatcaaaggaaataatgttatgctcatgccaactggaataataaagctgattgactttggctgtgccaggcgtttggcctgggcaggtttaaatggcacccacagtgacatgcttaagtccatgcatgggactccatattggatggccccagaagtcatcaatgagtctggctatggacggaaatcagatatctggagcattggttgtactgtgtttgagatggctacagggaagcctccactggcttccatggacaggatggccgccatgttttacatcggagcacaccgagggctgatgcctcctttaccagaccacttctcagaaaatgcagcagactttgtgcgcatgtgcctgaccagggaccagcatgagcgaccttctgctctccagctcctgaagcactccttcttggagagaagtcactgaatatacatcaagactttcttcccagttccactgcagatgctcccttgcttaattgtggggaatgatggctaagggatctttgtttccccactgaaaattcagtctaacccagtttaagcagatcctatggagtcattaactgaaagttgcagttacatattagcctcctcaagtgtcagacattattactcatagtatcagaaaacatgttcttaataacaacaaaaaactatttcagtgtttacagttttgattgtccaggaactacattctctattgttttatatgacatttctttttatttttggcctgtcctgtcaattttaatgttgttagtttaaaataaattgtaaaacccccttt

SEQ ID NO: 45 - DNA, 1782 bp, Mus musculus
atgtttggaaagaagaagaagcgggtggagatctcagccccatccaacttcgagcaccgtgtacacacaggctttgatcagcatgagcagaagttcacagggctgccccgccagtggcagagcctgattgaggaatcagcacgcagacccaagcccctgatcgaccctgcctgcatcacgtccatccagcctggagcccccaaaaccatcgttcggggcagcaaaggtgccaaggatggggctctcactctgctgcttgacgaatttgagaacatgtcggtgacgcgctccaactccctacgcagagagagtccaccaccacctgcccgtgcccaccaggagaatggaatgctggaggagcgggcagccccggccagaatggcccctgacaaagctggaagcagagcccgggccacaggccacagtgaggcaggcagtggcagtggtgacagacggcgggtggggccagagaaaaggcccaaatcttcgagggatggtccaggaggaccccaggaggcctcccgcgataagcgcccactctctgggcctgatgtcagcactcctcagcctggcagtctgaccagcgggacaaaactagcagctggcaggccctttaacacatacccacgggctgacacggaccacccaccccgcggtgcccagggggagccacataccatggcccctaatgggccttcagccacaggcctggccgctcctcagtcttcctcctcctcccggcctcccacccgagcccgtggtgctcccagcccaggagttctgggtccccatgcctctgagccccagttggcccccccagcacgtgcccttgctgcccctgctgtacctcctgcccctgggccccctgggcctcgctcaccacagcgggagccccaacgagtgtcccatgagcagttccgggctgccctgcagctggtggtggacccaggggaccctcgttcctatctagacaacttcatcaagattggtgagggctctacaggtattgtgtgcattgccactgtacgcagctcaggcaaactggtggccgtcaagaagatggacttgcgcaagcagcaaagacgtgaactgctcttcaatgaggtggtgatcatgcgggactaccggcacgagaacgtggtggagatgtacaacagctacctggtgggtgacgaactctgggtcgtcatggagttcctggaaggcggcgccctcacggatattgtcacccacaccaggatgaacgaggaacagatcgccgccgtgtgcctggctgtgcttcaggcgctggctgtgctccacgcccagggtgtcatccaccgtgacatcaagagtgactctatcttgctgacccatgatggccgggtgaagctgtccgacttcgggttttgtgcccaggtgagcaaggaggtgcctcggaggaagtcgctggtgggcaccccgtattggatggccccggagctcatctcccgccttccctatgggccagaggtggatatctggtcactgggggtgatggtgatcgagatggtggatggggagcccccttacttcaacgagccacccctcaaagctatgaagatgatccgggacaacctcccgccccgactgaagaacctgcacaaggcgtcaccgtctctgaaaggcttcttggatcgcctgctagtgcgggacccggcccagcgggccactgctgccgagctgctgaagcacccgttcctcaccaaggcggggccaccagccagcatcgtgcccctgatgcgccagcaccgaaccagatag

SEQ ID NO: 46 - DNA, 2171 bp, Homo sapiens
tcgcggcctcgccgccctcccgcgccccgcaccgggagcgggcctagagcactcgcctcgcccctccgcgagcagggctctggcgcccgcccctgtccgcaccgctggcagcctgaagagagtcgctggccatggtcgctgctaggtaggatatatctgcatcttgaaaggaagataaaacaaaagccttctttggaatagatggatttttgtcactttctgtgtgaactaaagtgattcaatgtctcttttggattgcttctgcacttcaagaacacaagatgaatcactcagacctgaaaaacagtctgaaaccagtatccatcaatacttggttgatgagccaaccctttcctggtcacctccatccactagagccagtgaagtactatgttccaccaacgtttctcactacgagctccaagtagaaacaggaagaggatttgacaacttgacttctgtccatcttgcatggcatactcccacgggaacactggtaactataaaaattacaaatctggaaaactgcaatgaagaacgcctgaaagctttacagaaagccgtgattctatcccactttttccggcatcccaatattacaacttactggacagttttcactgttggcagctggctttgggttatttctccatttatggcctatggttcagcaagtcaactcttgaggacctgttttcctgaaggaatgagtgaaactttaataagaaacattatctttggagctgtgagagggttgaactatctgtaccaaaatggctgtattcacaggagtattaaagccagccatatcctcatttctggtgatggcctagtgaccctctctggcctgtcccatctgcatagtttggttaagcatggacagaggcatagggctgtgtatgatttcccacagttcagcacatcagtgcagccgtggctgagtccagaactactgagacaggatttacatgggtataatgtgaagtcagatatttacagtgttgggattacagcatgtgaattagccagtgggcaggtgcctttccaggacatgcatagaactcagatgctgttacagaaactgaaaggtcctccttatagcccattggatatcagtattttccctcaatcagaatccagaatgaaaaattcccggtcaggtgtagactctggaattggagaaagtgtgcttgtctccagtggaactcacacagtaaatagtgaccgattacacacaccatcctcaaaaactttctctcctgccttctttagcttggtacagctctgtttgcaacaagatcctgagaaaaggccatcagcaagcagtttattgtcccatgttttcttcaaacagatgaaagaagaaagccaggattcaatactttcacggttgcctcctgcttataacaagccatcaataccattgcctccagtgttaccttggactgagccagaatgtgattttcctgatgaaaaagactcatacttggaattctagggctgccaaatcatttcatgtcctatatacttgacactttctccttgctgctttttcttctgtatttctaggtacaaatacgagaattatacttgaaaatacagttggtgcactggagaatctattatttaaaaccactctgttcaaaggggcaccagtttgtagtccctctgttttgcacagagtactatgacaaggaaacatcagaattaccaatctagctagtgtcatttattctggaatttttttctaagctgtgactaactctttttatctctcaatataatttttgagccagttaatttttttcagtattttgctgttccttgggaatgagccctcagaggacagtgcttccaagtacatcttcttctcccagattctctggcctttttaatgagctattgttaaaccaacaggctagtttatcttacatcagacccttttctggtagagggaaaatgtttgtgctttccttttttcttctgttaatacttatggtaacacctaactgagcctcactcacattaaatgattcacttgaaatatatacagaaattgtaatttgcttttttttaaaaaagggggctaaagtaacactttcctactttgtaaattatagatcttaaattcatgcaccccgtgggagctcaataaagatatactgaattga

SEQ ID NO: 47 - DNA, 1724 bp, Homo sapiens
ctcttggactccggctgcagcgtcagcctccctcgggcctcggcagcggcggcggctcgctcgcctcagccccagcgcccctcggctaccctcggaccaggcccgcagcgccgcccgccctcggccgccccgacgccggcctgggccgcggtcgcagccccgggctcgcgtaggcgccgaacgctcccggcccgcccactacgggcccaggctagaggcgccgccgccaccggcccgcggagcccggatgctggcccggaggaagccgatgctgccggcgctcaccatcaaccctaccatcgccgagggcccgtccccaaccagcgagggcgcctccgaggcaaacctggtggacctgcagaagaagctggaggagctggaacttgacgagcagcagaagcggctggaagcctttctcacccagaaagccaaggtcggcgaactcaaagacgatgacttcgaaaggacctcagagctggacgcgggcaacggcggggtggtcaccaaagtccagcacagaccctcgggcctcatcatggccaggaagctgatccaccttgagatcaagccggccatccggaaccagatcatccgcgagcaccaggtcctgcacgagtgcaactcaccgtacatcgtgggcttctacggggccttctactgtgacagggagatcagcatctgcatggagcacatggatggcggctccctggaccaggggctgaaagaggccaagaggattcccgaggacatcctggggaaagtcagcattgcggttctccggggcttggcgtacctccgagagaagcaccagatcatgcaccgaaatgtgaagccctccaacatcctcgtgaactctagaggggagatcaagctgtgtgacttcggggtgagcggccagctcatcgactccatggccaactccttcgtgggcacgcgctcctacatggctccggagcggttgcagggcacacattactcggtgcagtcggtcatctggagcatggacctgtccctggtggagctggccatcgaaaggtaccccatccccccgcccgacgccaaggagctggaggccatctttggccagcccgtggtcgacagggaagaaggagagcctcacagcatctcctcttggccagggtcccccgggcgccccaacagcggttacgggatggacagcctgcccgccatggccatcttcgaactgctggactatattgtgaaagagccgcctcctaagctgcccaacggtgtgttcacccccgacttccaggagtttgtcaataaatgcctcatcaaaaacccaacggagcgggcggacctaaagatgctcacaaaccacgccttcatcaagcggtccgaggtgaaagaagcggattttgcctgctagttgtgtaaaaccctggggctgaaccagcccggcacacccacgcgcaccgccgtgtaacagtggccaggctccccgcgtcccgctggtgacctgcccaccgtccctgtccacgccccgcccttccagctgaggacaggctggcgcctccacccaccctcctgcctcacccctgcggagagcaccgtggcggggcgacaactgcgcacgcaggaacgggggtctcctctcctgctggtccctgccggcgtgcctctagggacgggcgacgctgctgtgtgtggtctcagagcctctgcttccttaggttacaaaacaaaacagggagagaaaaacc

SEQ ID NO: 48 - DNA, 4232 bp, Homo sapiens
cggggactcggaggtactgggcgcgcgcggctccggctcgggacgcctcgggacgcctcggggtcgggctccggctgcggctgctgctgcggcgcccgcgctccggtgcgctccgcctcctgtgcccgccgcggagcgcagtctgcgcgcccgccgtgcgccctcagctccttttcctgagcccgccgcgatgggagctgcgcggggatccccggccagaccccgccggttgcctctgctcagcgtcctgctgctgccgctgctgggcggtacccagacagccattgtcttcatcaagcagccgtcctcccaggatgcactgcaggggcgccgggcgctgcttcgctgtgaggttgaggctccgggcccggtacatgtgtactggctgctcgatggggcccctgtccaggacacggagcggcgtttcgcccagggcagcagcctgagctttgcagctgtggaccggctgcaggactctggcaccttccagtgtgtggctcgggatgatgtcactggagaagaagcccgcagtgccaacgcctccttcaacatcaaatggattgaggcaggtcctgtggtcctgaagcatccagcctcggaagctgagatccagccacagacccaggtcacacttcgttgccacattgatgggcaccctcggcccacctaccaatggttccgagatgggacccccctttctgatggtcagagcaaccacacagtcagcagcaaggagcggaacctgacgctccggccagctggtcctgagcatagtgggctgtattcctgctgcgcccacagtgcttttggccaggcttgcagcagccagaacttcaccttgagcattgctgatgaaagctttgccagggtggtgctggcaccccaggacgtggtagtagcgaggtatgaggaggccatgttccattgccagttctcagcccagccacccccgagcctgcagtggctctttgaggatgagactcccatcactaaccgcagtcgccccccacacctccgcagagccacagtgtttgccaacgggtctctgctgctgacccaggtccggccacgcaatgcagggatctaccgctgcattggccaggggcagaggggcccacccatcatcctggaagccacacttcacctagcagagattgaagacatgccgctatttgagccacgggtgtttacagctggcagcgaggagcgtgtgacctgccttccccccaagggtctgccagagcccagcgtgtggtgggagcacgcgggagtccggctgcccacccatggcagggtctaccagaagggccacgagctggtgttggccaatattgctgaaagtgatgctggtgtctacacctgccacgcggccaacctggctggtcagcggagacaggatgtcaacatcactgtggccactgtgccctcctggctgaagaagccccaagacagccagctggaggagggcaaacccggctacttggattgcctgacccaggccacaccaaaacctacagttgtctggtacagaaaccagatgctcatctcagaggactcacggttcgaggtcttcaagaatgggaccttgcgcatcaacagcgtggaggtgtatgatgggacatggtaccgttgtatgagcagcaccccagccggcagcatcgaggcgcaagcccgtgtccaagtgctggaaaagctcaagttcacaccaccaccccagccacagcagtgcatggagtttgacaaggaggccacggtgccctgttcagccacaggccgagagaagcccactattaagtgggaacgggcagatgggagcagcctcccagagtgggtgacagacaacgctgggaccctgcattttgcccgggtgactcgagatgacgctggcaactacacttgcattgcctccaacgggccgcagggccagattcgtgcccatgtccagctcactgtggcagtttttatcaccttcaaagtggaaccagagcgtacgactgtgtaccagggccacacagccctactgcagtgcgaggcccagggggaccccaagccgctgattcagtggaaaggcaaggaccgcatcctggaccccaccaagctgggacccaggatgcacatcttccagaatggctccctggtgatccatgacgtggcccctgaggactcaggccgctacacctgcattgcaggcaacagctgcaacatcaagcacacggaggcccccctctatgtcgtggacaagcctgtgccggaggagtcggagggccctggcagccctcccccctacaagatgatccagaccattgggttgtcggtgggtgccgctgtggcctacatcattgccgtgctgggcctcatgttctactgcaagaagcgctgcaaagccaagcggctgcagaagcagcccgagggcgaggagccagagatggaatgcctcaacggtgggcctttgcagaacgggcagccctcagcagagatccaagaagaagtggccttgaccagcttgggctccggccccgcggccaccaacaaacgccacagcacaagtgataagatgcacttcccacggtctagcctgcagcccatcaccacgctggggaagagtgagtttggggaggtgttcctggcaaaggctcagggcttggaggagggagtggcagagaccctggtacttgtgaagagcctgcagagcaaggatgagcagcagcagctggacttccggagggagttggagatgtttgggaagctgaaccacgccaacgtggtgcggctcctggggctgtgccgggaggctgagccccactacatggtgctggaatatgtggatctgggagacctcaagcagttcctgaggatttccaagagcaaggatgaaaaattgaagtcacagcccctcagcaccaagcagaaggtggccctatgcacccaggtagccctgggcatggagcacctgtccaacaaccgctttgtgcataaggacttggctgcgcgtaactgcctggtcagtgcccagagacaagtgaaggtgtctgccctgggcctcagcaaggatgtgtacaacagtgagtactaccacttccgccaggcctgggtgccgctgcgctggatgtcccccgaggccatcctggagggtgacttctctaccaagtctgatgtctgggccttcggtgtgctgatgtgggaagtgtttacacatggagagatgccccatggtgggcaggcagatgatgaagtactggcagatttgcaggctgggaaggctagacttcctcagcccgagggctgcccttccaaactctatcggctgatgcagcgctgctgggccctcagccccaaggaccggccctccttcagtgagattgccagcgccctgggagacagcaccgtggacagcaagccgtgaggagggagcccgctcaggatggcctgggcaggggaggacatctctagagggaagctcacagcatgatgggcaagatccctgtcctcctgggccctgaggcccctgccctagtgcaacaggcattgctgaggtctgagcagggcctggcctttcctcctcttcctcaccctcatcctttgggaggctgacttggacccaaactgggcgactagggctttgagctgggcagttttccctgccacctcttcctctatcagggacagtgtgggtgccacaggtaaccccaatttctggccttcaacttctccccttgaccgggtccaactctgccactcatctgccaactttgcctggggagggctaggcttgggatgagctgggtttgtggggagttccttaatattctcaagttctgggcacacagggttaatgagtctcttggcccactggtcccacttgggggtctagaccaggattatagaggacacagcaagtgagtcctccccactctgggcttgtgcacactgacccagacccacgtcttccccacccttctctcctttcctcatcctaagtgcctggcagatgaaggagttttcaggagcttttgacactatataaaccgccctttttgtatgcaccacgggcggcttttatatgtaattgcagcgtggggtgggtgggcatgggaggtaggggtgggccctggagatgaggagggtgggccatccttaccccacacttttattgttgtcgttttttgtttgttttgtttttttgtttttgtttttgtttttacactcgctgctctcaataaataagccttttt

SEQ ID NO: 49 - DNA, 5313 bp, Homo sapiens
gggtgatgcggcggctcgggccggggccgcgggcgtcctgagcgcagcgccctcccgggatgcccgccggccgctggcccggccatgtcgtcgtccttcttcaaccccagcttcgccttcagctcgcacttcgaccccgacggcgccccgctcagcgagctgtcctggccatcctccctcgccgtggtggctgtgtctttctccgggctcttcgccgtcatcgtcctcatgctggcctgcctgtgctgtaagaagggcggtatcgggttcaaggagtttgagaatgcggagggggacgagtacgcagccgacctggcgcagggctccccggccacggcagcacagaacgggcccgacgtgtacgtcctgccactcacggaggtctccttgcccatggccaagcagcctgggcgctcagtgcagctcctcaagtccacagacgtgggccggcacagcctcctgtacctgaaggaaatcggccgtggctggttcgggaaggtgttcctgggggaggtgaactctggcatcagcagtgcccaggtggtggtgaaggagctgcaggctagtgccagcgtgcaggagcagatgcagttcctggaggaggtgcagccctacagggccctgaagcacagcaacctgctccagtgcctggcccagtgcgccgaggtgacgccctacctgctggtgatggagttctgcccactgggggacctcaagggctacctgcggagctgccgggtggcggagtccatggctcccgacccccggaccctgcagcgcatggcctgtgaggtggcctgtggcgtcctgcaccttcatcgcaacaatttcgtgcacagcgacctggccctgcggaactgcctgctcacggctgacctgacggtgaagattggtgactatggcctggctcactgcaagtacagagaggactacttcgtgactgccgaccagctgtgggtgcctctgcgctggatcgcgccagagctggtggacgaggtgcatagcaacctgctcgtcgtggaccagaccaagagcgggaatgtgtggtccctgggcgtgaccatctgggagctctttgagctgggcacgcagccctatccccagcactcggaccagcaggtgctggcgtacacggtccgggagcagcagctcaagctgcccaagccccagctgcagctgaccctgtcggaccgctggtacgaggtgatgcagttctgctggctgcagcccgagcagcggcccacagccgaggaggtgcacctgctgctgtcctacctgtgtgccaagggcgccaccgaagcagaggaggagtttgaacggcgctggcgctctctgcggcccggcgggggcggcgtggggcccgggcccggtgcggcggggcccatgctgggcggcgtggtggagctcgccgctgcctcgtccttcccgctgctggagcagttcgcgggcgacggcttccacgcggacggcgacgacgtgctgacggtgaccgagaccagccgaggcctcaattttgagtacaagtgggaggcgggccgcggcgcggaggccttcccggccacgctgagccctggccgcaccgcacgcctgcaggagctgtgcgcccccgacggcgcgcccccgggcgtggttccggtgctcagcgcgcacagcccgtcgctgggcagcgagtacttcatccgcctagaggaggccgcacccgccgccggccacgaccctgactgcgccggctgcgcccccagtccacctgccaccgcggaccaggacgacgactctgacggcagcaccgccgcctcgctggccatggagccgctgctgggccacgggccacccgtcgacgtcccctggggccgcggcgaccactaccctcgcagaagcttggcgcgggacccgctctgcccctcacgctctccctcgccctcggcggggcccctgagtctggcggagggaggagcggaggatgcagactggggcgtggccgccttctgtcctgccttcttcgaggacccactgggcacgtcccctttggggagctcaggggcgcccccgctgccgctgactggcgaggatgagctagaggaggtgggagcgcggagggccgcccagcgcgggcactggcgctccaacgtgtcagccaacaacaacagcggcagccgctgtccagagtcctgggaccccgtctctgcgggctgccacgctgagggctgccccagtccaaagcagaccccacgggcctcccccgagccggggtaccctggagagcctctgcttgggctccaggcagcctctgcccaggagccaggctgctgccccggcctccctcatctatgctctgcccagggcctggcacctgctccctgcctggttacaccctcctggacagagacagccagtagtgggggtgaccacccgcaggcagagcccaagcttgccacggaggctgagggcactaccggaccccgcctgccccttccttccgtcccctccccatcccaggagggagccccacttccctcggaggaggccagtgcccccgacgcccctgatgccctgcctgactctcccacgcctgctactggtggcgaggtgtctgccatcaagctggcttctgccctgaatggcagcagcagctctcccgaggtggaggcacccagcagtgaggatgaggacacggctgaggccacctcaggcatcttcaccgacacgtccagcgacggcctgcaggccaggaggccggatgtggtgccagccttccgctctctgcagaagcaggtggggacccccgactccctggactccctggacatcccgtcctcagccagtgatggtggctatgaggtcttcagcccgtcggccactggcccctctggagggcagccgcgagcgctggacagtggctatgacaccgagaactatgagtcccctgagtttgtgctcaaggaggcgcaggaagggtgtgagccccaggcctttgcggagctggcctcagagggtgagggccccgggcccgagacacggctctccacctccctcagtggcctcaacgagaagaatccctaccgagactctgcctacttctcagacctcgaggctgaggccgaggccacctcaggcccagagaagaagtgcggcggggaccgagcccccgggccagagctgggcctgccgagcactgggcagccgtctgagcaggtctgtctcaggcctggggtttccggggaggcacaaggctctggccccggggaggtgctgcccccactgctgcagcttgaagggtcctccccagagcccagcacctgcccctcgggcctggtcccagagcctccggagccccaaggcccagccaaggtgcggcctgggcccagccccagctgctcccagtttttcctgctgaccccggttccgctgagatcagaaggcaacagctctgagttccaggggcccccaggactgttgtcagggccggccccacaaaagcggatggggggcccaggcacccccagagccccactccgcctggctctgcccggcctccctgcggccttggagggccggccggaggaggaggaggaggacagtgaggacagcgacgagtctgacgaggagctccgctgctacagcgtccaggagcctagcgaggacagcgaagaggaggcgccggcggtgcccgtggtggtggctgagagccagagcgcgcgcaacctgcgcagcctgctcaagatgcccagcctgctgtccgagaccttctgcgaggacctggaacgcaagaagaaggccgtgtccttcttcgacgacgtcaccgtctacctctttgaccaggaaagccccacccgggagctcggggagcccttcccgggcgccaaggaatcgccccctacgttccttagggggagccccggctctcccagcgcccccaaccggccgcagcaggctgatggctccccaaatggctccacagcggaagagggtggtgggttcgcgtgggacgacgacttcccgctgatgacggccaaggcagccttcgccatggccctagacccggccgcacccgccccggctgcgcccacgcccacgcccgctcccttctcgcgcttcacggtgtcgcccgcgcccacgtcccgcttctccatcacgcacgtgtctgactcggacgccgagtccaagagaggacctgaagctggtgccgggggtgagagtaaagaggcttgagacctgggcagctcctgcccctcaaggctggcgtcaccggagcccctgccaggcagcagcgaggatggtgaccgagaaggtggggaccacgtcctggtggctgttggcagcagattcaggtgcctctgccccacgcggtgtcctggagaagcccgtgggatgagaggccctggatggtagatcggccatgctccgccccagaggcagaattcgtctgggcttttaggcttgctgctagcccctgggggcgcctggagccacagtgggtgtctgtacacacatacacactcaaaaggggccagtgcccctgggcacggcggcccccaccctctgccctgcctgcctggcctcggaggacccgcatgccccatccggcagctcctccggtgtgctcacaggacacttaaaccaggacgaggcatggccccgagacactggcaggtttgtgagcctcttcccaccccctgtgcccccacccttgcctggttcctggtggctcagggcaaggagtggccctgggcgcccgtgtcggtcctgtttccgctgcccttatctcaaagtccgtggctgtttccccttcactgactcagctagacccgtaagcccacccttcccacagggaacaggctgctcccacctgggtcccgctgtggccacggtgggcagcccaaaagatcaggggtggaggggcttccaggctgtactcctgccccgtgggccccgttctagaggtgcccttggcaggaccgtgcaggcagctcccctctgtggggcagtatctggtcctgtgccccagctgccaaaggagagtgggggccatgccccgcagtcagtgttggggggctcctgcctacagggagagggatggtggggaaggggtggagctgggggcagggcagcacagggaatatttttgtaactaactaactgctgtggttggagcgaatggaagttgggtgattttaagttattgttgccaaagagatgtaaagtttattgttgcttcgcagggggatttgttttgtgttttgtttgaggcttagaacgctggtgcaatgttttcttgttccttgttttttaagagaaatgaagctaagaaaaaag

SEQ ID NO: 50 - DNA, 3663 bp, Homo sapiens
cggctcggggctgtgagcggctcggggccgggggtgggcggcggtgcggcgggcggccgacgctcctcttcggcggcggcggcggcggccatgcgtggggcggcgcggctggggcggccgggccggagttgcctcccgggggcccgcggcctgagggccccgccgccgccgccgctgctgcttctgcttgcgctgttgccgctgctgcccgcgcctggcgctgccgccgcccccgccccgcggcccccggagctgcagtcggcttccgcggggcccagcgtgagtctctacctgagcgaggacgaggtgcgccggctgatcggtcttgatgcagaactttattatgtgagaaatgaccttattagtcactacgctctatcctttagtctgttagtacccagtgagacaaatttcctgcacttcacctggcatgcgaagtccaaggttgaatataagctgggattccaagtggacaatgttttggcaatggatatgccccaggtcaacatttctgttcagggggaagttccacgcactttatcagtgtttcgggtagagctttcctgtactggcaaagtagattctgaagttatgatactaatgcagctcaacttgacagtaaattcttcaaaaaattttaccgtcttaaattttaaacgaaggaaaatgtgctacaaaaaacttgaagaagtaaaaacttcagccttggacaaaaacactagcagaactatttatgatcctgtacatgcagctccaaccacttctacgcgtgtgttttatattagtgtaggggtttgttgtgcagtaatatttctcgtagcaataatattagctgttttgcaccttcatagtatgaaaaggattgaactggatgacagcattagtgccagcagtagttcccaagggctgtctcagccatccacccagacgactcagtatctgagagcagacacgcccaacaatgcaactcctatcaccagttatcctaccttgcggatagagaagaacgacttgagaagtgtcactcttttggaggccaaaggcaaggtgaaggatatagcaatatccagagagaggataactctaaaagatgtactccaagaaggtacttttgggcgtattttccatgggattttaatagatgaaaaagatccaaataaagaaaaacaagcatttgtcaaaacagttaaagatcaagcttctgaaattcaggtgacaatgatgctcactgaaagttgtaagctgcgaggtcttcatcacagaaatcttcttcctattactcatgtgtgtatagaagaaggagaaaagcccatggtgatattgccttacatgaattgggggaatcttaaattgtttttacgacagtgcaagttagtagaggccaataatccacaggcaatttctcagcaagacctggtacacatggctattcagattgcctgtggaatgagctacctggccagaagggaagtcatccacaaagacctggctgccaggaactgtgtcattgatgacacacttcaagttaagatcacagacaatgccctctccagagacttgttccccatggactatcactgtctgggggacaatgaaaacaggccagttcgttggatggctcttgaaagtctggttaataacgagttctctagcgctagtgatgtgtgggcctttggagtgacgctgtgggaactcatgactctgggccagactccctacgtggacattgaccccttcgagatggccgcatacctgaaagatggttaccgaatagcccagccaatcaactgtcctgatgaattatttgctgtgatggcctgttgctgggccttagatccagaggagaggcccaagtttcagcagctggtacagtgcctaacagagtttcatgcagccctgggggcctacgtctgactcctctccaatcccacaccatcaggaagaaggtgcctgtcggggctcacttgaagcctgtcagggatgctttgtatctaacacaacgccaacagaagcacatttgtcttccagaacaccgtgccttagaaatgctttagaatctgaactttttaagacagacttaataatgtggcatattttctagatatcacttttattaggttgaactgaaagggtttttgtaaattttttggccaaaattttttaaaacatacttactttggactaggggtacattcttacaaaataaataaacagtttttaaaattgtttagacacagatatttggaattagctatcttagtgccaactgctttttatttttttacttcatcaaggtgatgtaagtgactcacctttaaagtttttttagtgttattttttatcactactctgggaaatggtttgtcttcaagatgcaatacttttcttagtaaaggaaaaacagcataaaaagatacctggtctgccttgtacaagaaaaggcaatattagaggaagaaaatttaaagaaaagctagaggaaaaaaaaattttttaaaaaatacttattagaagcaaactgcccttgcatggaaaactgtttatttttttcagtgaaaaggaattctgctttcgtgtttttgggaaagcaggaactgagttcattacatctttaatttggcagaaattagcctttctgtgaaccagatgtggtttggggcagatctgtagtaaacaatggtgattttatttatttttactctctggaaaaggagataatacaattccagaaagtgaactcatatttctaaggttaagattcccttttattgcacctagaatagtgctatgcacagagcgggtgcttgagttgttgtcgttttttgtttgttttttaaatgtaaactggtaaattttgtgcttatcttcaaggctggcttaagtataaaattgttttttaaacacttgaaaaattaaaggatttgttttatattatgacagtattgaaattatttttcataatgaatgattggttattgtgtctggtaagtctttgaacattcaacagccagacatttgtgttttatttcatgatgttccagtcaagttccaaagccctaacacagttaagctggctcagactccaggttctagtaaaaagttggaattaatgttataaggaagtattaaaacactgaaacatttctccagaaccagcaagtaagggatatgtatgtatttatgctcagttttagttggcctaaagcagagttgaatgggctttctaaatagctaggcctgcaggtacctgccactactcccatcttcagaggtatataagggagaatgtgtagcagttggaggcttttgctgtttttaaaaaagccttatgaatcagcagcacatcgggaaaaatagctcacatagtacctggttttccacaagtaagccaagggcatgattttctgtgtacatttattaacagttctttggttttatgaaatactcatatgaagccagtccctggagtactgttttttaaaaggtccctttgaaccatttgtaaattatattttcattcataacctgcattcttagaaggcattcagtcaacatttacagcacttactgtgtattttccacatggagtggttcaactcaagcgtcccttccagtattcagggcattcttatttcatgttcaagtgagtgcattgtttagaaa

SEQ ID NO: 51 - DNA, 9753 bp, Homo sapiens
gagatctggagataggcggctttcatttttcctgctcccagttcccagaccttccgtggggccgcaggatccccggctggcgggtcgcggagggtggccggccgggctgcgcactgcgcgcctccgctgcggggctccgggcctgtggactcagcggagtccgctgagtcagtttcttcccgcgcgactcccggccgcgccgccgctgcggtggaatctggtcccaggaggcggcgtccgcccggggtccggtctaggcgtgcgtgggggccacggtcacggtcatcccagccaggcccggctccagcagccccacggccgccgccagagttctgcgcggcccgtcgcctcggcggagcctctggcaggcccctgagctcgtttttggggcctgagtgggggaggaggaagccgagcaggagggctccggagagggagggcaacgcggggcggggagctgcctccttcctcataaacaggcgggcgtgggcgccgatggggcccgcggggagcgctggctgcgggcggtgagctgagctcgcccccggggagctgtggccggcgcccctgccggttccctgagcagcggacgttcatgctgggagggcggcgggttggaagcaggtgccaccatggctagtggcagctgtcaggggtgcgaagaggacgaggaaactctgaagaagttgatagtcaggctgaacaatgtccaggaaggaaaacagatagaaacgctggtccaaatcctggaggatctgctggtgttcacgtactccgagcacgcctccaagttatttcaaggcaaaaatatccatgtgcctctgttgatcgtcttggactcctatatgagagtcgcgagtgtgcagcaggtgggttggtcacttctgtgcaaattaatagaagtctgtccaggtacaatgcaaagcttaatgggaccccaggatgttggaaatgattgggaagtccttggtgttcaccaattgattcttaaaatgctaacagttcataatgccagtgtaaacttgtcagtgattggactgaagaccttagatctcctcctaacttcaggtaaaatcaccttgctgatattggatgaagaaagtgatattttcatgttaatttttgatgccatgcactcatttccagccaatgatgaagtccagaaacttggatgcaaagctttacatgtgctgtttgagagagtctcagaggagcaactgactgaatttgttgagaacaaagattatatgatattgttaagtgcgttaacaaattttaaagatgaagaggaaattgtgcttcatgtgctgcattgtttacattccctagcgattccttgcaataatgtggaagtcctcatgagtggcaatgtcaggtgttataatattgtggtggaagctatgaaagcattccctatgagtgaaagaattcaagaagtgagttgctgtttgctccataggcttacattaggtaattttttcaatatcctggtattaaacgaagtccatgagtttgtggtgaaagctgtgcagcagtacccagagaatgcagcattgcagatctcagcgctcagctgtttggccctcctcactgagactattttcttaaatcaagatttagaggaaaagaatgagaatcaagagaatgatgatgagggggaagaagataaattgttttggctggaagcctgttacaaagcattaacgtggcatagaaagaacaagcacgtgcaggaggccgcatgctgggcactaaataatctccttatgtaccaaaacagtttacatgagaagattggagatgaagatggccatttcccagctcatagggaagtgatgctctccatgctgatgcattcttcatcaaaggaagttttccaggcatctgcgaatgcattgtcaactctcttagaacaaaatgttaatttcagaaaaatactgttatcaaaaggaatacacctgaatgttttggagttaatgcagaagcatatacattctcctgaagtggctgaaagtggctgtaaaatgctaaatcatctttttgaaggaagcaacacttccctggatataatggcagcagtggtccccaaaatactaacagttatgaaacgtcatgagacatcattaccagtgcagctggaggcgcttcgagctattttacattttatagtgcctggcatgccagaagaatccagggaggatacagaatttcatcataagctaaatatggttaaaaaacagtgtttcaagaatgatattcacaaactggtcctagcagctttgaacaggttcattggaaatcctgggattcagaaatgtggattaaaagtaatttcttctattgtacattttcctgatgcattagagatgttatccctggaaggtgctatggattcagtgcttcacacactgcagatgtatccagatgaccaagaaattcagtgtctgggtttaagtcttataggatacttgattacaaagaagaatgtgttcataggaactggacatctgctggcaaaaattctggtttccagcttataccgatttaaggatgttgctgaaatacagactaaaggatttcagacaatcttagcaatcctcaaattgtcagcatctttttctaagctgctggtgcatcattcatttgacttagtaatattccatcaaatgtcttccaatatcatggaacaaaaggatcaacagtttctaaacctctgttgcaagtgttttgcaaaagtagctatggatgattacttaaaaaatgtgatgctagagagagcgtgtgatcagaataacagcatcatggttgaatgcttgcttctattgggagcagatgccaatcaagcaaaggagggatcttctttaatttgtcaggtatgtgagaaagagagcagtcccaaattggtggaactcttactgaatagtggatctcgtgaacaagatgtacgaaaagcgttgacgataagcattgggaaaggtgacagccagatcatcagcttgctcttaaggaggctggccctggatgtggccaacaatagcatttgccttggaggattttgtataggaaaagttgaaccttcttggcttggtcctttatttccagataagacttctaatttaaggaaacaaacaaatatagcatctacactagcaagaatggtgatcagatatcagatgaaaagtgctgtggaagaaggaacagcctcaggcagcgatggaaatttttctgaagatgtgctgtctaaatttgatgaatggacctttattcctgactcttctatggacagtgtgtttgctcaaagtgatgacctggatagtgaaggaagtgaaggctcatttcttgtgaaaaagaaatctaattcaattagtgtaggagaattttaccgagatgccgtattacagcgttgctcaccaaatttgcaaagacattccaattccttggggcccatttttgatcatgaagatttactgaagcgaaaaagaaaaatattatcttcagatgattcactcaggtcatcaaaacttcaatcccatatgaggcattcagacagcatttcttctctggcttctgagagagaatatattacatcactagacctttcagcaaatgaactaagagatattgatgccctaagccagaaatgctgtataagtgttcatttggagcatcttgaaaagctggagcttcaccagaatgcactcacgagctttccacaacagctatgtgaaactctgaagagtttgacacatttggacttgcacagtaataaatttacatcatttccttcttatttgttgaaaatgagttgtattgctaatcttgatgtctctcgaaatgacattggaccctcagtggttttagatcctacagtgaaatgtccaactctgaaacagtttaacctgtcatataaccagctgtcttttgtacctgagaacctcactgatgtggtagagaaactggagcagctcattttagaaggaaataaaatatcagggatatgctcccccttgagactgaaggaactgaagattttaaaccttagtaagaaccacatttcatccctatcagagaactttcttgaggcttgtcctaaagtggagagtttcagtgccagaatgaattttcttgctgctatgcctttcttgcctccttctatgacaatcctaaaattatctcagaacaaattttcctgtattccagaagcaattttaaatcttccacacttgcggtctttagatatgagcagcaatgatattcagtacctaccaggtcccgcacactggaaatctttgaacttaagggaactcttatttagccataatcagatcagcatcttggacttgagtgaaaaagcatatttatggtctagagtagagaaactgcatctttctcacaataaactgaaagagattcctcctgagattggctgtcttgaaaatctgacatctctggatgtcagttacaacttggaactaagatcctttcccaatgaaatggggaaattaagcaaaatatgggatcttcctttggatgaactgcatcttaactttgattttaaacatataggatgtaaagccaaagacatcataaggtttcttcaacagcgattaaaaaaggctgtgccttataaccgaatgaaacttatgattgtgggaaatactgggagtggtaaaaccaccttattgcagcaattaatgaaaaccaagaaatcagatcttggaatgcaaagtgccacagttggcatagatgtgaaagactggcctatccaaataagagacaaaagaaagagagatctcgtcctaaatgtgtgggattttgcaggtcgtgaggaattctatagtactcatccccattttatgacgcagcgagcattgtaccttgctgtctatgacctcagcaagggacaggctgaagttgatgccatgaagccttggctcttcaatataaaggctcgcgcttcttcttcccctgtgattctcgttggcacacatttggatgtttctgatgagaagcaacgcaaagcctgcatgagtaaaatcaccaaggaactcctgaataagcgagggttccctgccatacgagattaccactttgtgaatgccaccgaggaatctgatgctttggcaaaacttcggaaaaccatcataaacgagagccttaatttcaagatccgagatcagcttgttgttggacagctgattccagactgctatgtagaacttgaaaaaatcattttatcggagcgtaaaaatgtgccaattgaatttcccgtaattgaccggaaacgattattacaactagtgagagaaaatcagctgcagttagatgaaaatgagcttcctcacgcagttcactttctaaatgaatcaggagtccttcttcattttcaagacccagcactgcagttaagtgacttgtactttgtggaacccaagtggctttgtaaaatcatggcacaggatgttagcagcatttttggcctttatattcgagacattttgacagtgaaagtggaaggttgtccaaaacaccctaagggcattatttcgcgtagagatgtggaaaaatttctttcaaaaaaaaggaaatttccaaagaactacatgtcacagtattttaagctcctagaaaaattccagattgctttgccaataggagaagaatatttgctggttccaagcagtttgtctgaccacaggcctgtgatagagcttccccattgtgagaactctgaaattatcatccgactatatgaaatgccttattttccaatgggattttggtcaagattaatcaatcgattacttgagatttcaccttacatgctttcagggagaggctgtattcttttgggccaagttgtggaccacattgattctctcatggaagaatggtttcctgggttgctggagattgatatttgtggtgaaggagaaactctgttgaagaaatgggcattatatagttttaatgatggtgaagaacatcaaaaaatcttacttgatgacttgatgaagaaagcagaggaaggagatctcttagtaaatccagatcaaccaaggctcaccattccaatatctcagattgcccctgacttgattttggctgacctgcctagaaatattatgttgaataatgatgagttggaatttgaacaagctccagagtttctcctagactgttttgtgtgtattcacttatatccatcaagtgactacatttcaaggcactatatgagaaccataaatattgtacaaacaggatttgctaaatgtcggtggagagtaacagtccacggggctgatcatggtgatggcagttttggatcagtttaccgagcagcctatgaaggagaagaagtggctgtgaagatttttaataaacatacatcactcaggctgttaagacaagagcttgtggtgctttgccacctccaccaccccagtttgatatctttgctggcagctgggattcgtccccggatgttggtgatggagttagcctccaagggttccttggatcgcctgcttcagcaggacaaagccagcctcactagaaccctacagcacaggattgcactccacgtagctgatggtttgagatacctccactcagccatgattatataccgagacctgaaaccccacaatgtgctgcttttcacactgtatcccaatgctgccatcattgcaaagattgctgactacggcattgctcagtactgctgtagaatggggataaaaacatcagagggcacaccagggtttcgtgcacctgaagttgccagaggaaatgtcatttataaccaacaggctgatgtttattcatttggtttactactctatgacattttgacaactggaggtagaatagtagagggtttgaagtttccaaatgagtttgatgaattagaaatacaaggaaaattacctgatccagttaaagaatatggttgtgccccatggcctatggttgagaaattaattaaacagtgtttgaaagaaaatcctcaagaaaggcctacttctgcccaggtctttgacattttgaattcagctgaattagtctgtctgacgagacgcattttattacctaaaaacgtaattgttgaatgcatggttgctacacatcacaacagcaggaatgcaagcatttggctgggctgtgggcacaccgacagaggacagctctcatttcttgacttaaatactgaaggatacacttctgaggaagttgctgatagtagaatattgtgcttagccttggtgcatcttcctgttgaaaaggaaagctggattgtgtctgggacacagtctggtactctcctggtcatcaataccgaagatgggaaaaagagacataccctagaaaagatgactgattctgtcacttgtttgtattgcaattccttttccaagcaaagcaaacaaaaaaattttcttttggttggaaccgctgatggcaagttagcaatttttgaagataagactgttaagcttaaaggagctgctcctttgaagatactaaatataggaaatgtcagtactccattgatgtgtttgagtgaatccacaaattcaacggaaagaaatgtaatgtggggaggatgtggcacaaagattttctccttttctaatgatttcaccattcagaaactcattgagacaagaacaagccaactgttttcttatgcagctttcagtgattccaacatcataacagtggtggtagacactgctctctatattgctaagcaaaatagccctgttgtggaagtgtgggataagaaaactgaaaaactctgtggactaatagactgcgtgcactttttaagggaggtaatggtaaaagaaaacaaggaatcaaaacacaaaatgtcttattctgggagagtgaaaaccctctgccttcagaagaacactgctctttggataggaactggaggaggccatattttactcctggatctttcaactcgtcgacttatacgtgtaatttacaacttttgtaattcggtcagagtcatgatgacagcacagctaggaagccttaaaaatgtcatgctggtattgggctacaaccggaaaaatactgaaggtacacaaaagcagaaagagatacaatcttgcttgaccgtttgggacatcaatcttccacatgaagtgcaaaatttagaaaaacacattgaagtgagaaaagaattagctgaaaaaatgagacgaacatctgttgagtaagagagaaataggaattgtctttggataggaaaattattctctcctcttgtaaatatttattttaaaaatgttcacatggaaagggtactcacattttttgaaatagctcgtgtgtatgaaggaatgttattatttttaatttaaatatatgtaaaaatacttaccagtaaatgtgtattttaaagaactatttaaaacacaatgttatatttcttataaataccagttactttcgttcattaattaatgaaaataaatctgtgaagtacctaatttaagtactcatactaaaatttataaggccgataattttttgttttcttgtctgtaatggaggtaaactttattttaaattctgtgcttaagacaggactattgcttgtcgatttttctagaaatctgcacggtataatgaaaatattaagacagtttcccatgtaatgtattccttcttagattgcatcgaaatgcactatcatatatgcttgtaaatattcaaatgaatttgcactaataaagtcctttgttggtatgtgaattctctttgttgctgttgcaaacagtgcatcttacacaacttcactcaattcaaaagaaaactccattaaaagtactaatgaaaaaacatgacatactgtcaaagtcctcatatctaggaaagacacagaaactctctttgtcacagaaactctctgtgtctttcctagacataatagagttgtttttcaactctatgtttgaatgtggataccctgaattttgtataattagtgtaaatacagtgttcagtccttcaagtgatatttttatttttttattcataccactagctacttgttttctaatctgcttcattctaatgcttatattcatcttttccctaaatttgtgatgctgcagatcctacatcattcagatagaaacctttttttttttcagaattatagaattccacagctcctaccaagaccatgaggataaatatctaacacttttcagttgctgaaggagaaaggagctttagttatgatggataaaaatatctgccaccctaggcttccaaattatacttaaattgtttacatagcttaccacaataggagtatcagggccaaatacctatgtaataatttgaggtcatttctgctttaggaaaagtactttcggtaaattctttggccctgaccagtattcattatttcagataattccctgtgataggacaactagtacatttaatattctcagaacttatggcattttactatgtgaaaactttaaatttatttatattaagggtaatcaaattcttaaagatgaaagattttctgtattttaaaggaagctatgctttaacttgttatgtaattaacaaaaaaatcatatataatagagctctttgttccagtgttatctctttcattgttactttgtatttgcaattttttttaccaaagacaaattaaaaaaatgaataccatatttaaatggaataataaaggttttttaaaaactt

SEQ ID NO: 52 - DNA, 4667 bp, Homo sapiens
cagggcctgggcacgaccatggtgggacgtcgcccgcggcttcggggaccgctgcggcagcagaggcggctggccaggaacgcgggccgaggctggaccctttgggcagctagcccgtgatctctgccgtcaccgatcgcgattcctaccccctcgccttcccccggcgccgacggccacaccgccggacgatgcgcgcccgcggccgcccgggaggctgagcccagcttcccgctccgccttccccgcgcagctgcccccatggctttgcggggcgccgcgggagcgaccgacaccccggtgtcctcggccgggggagcccccggcggctcagcgtcctcgtcgtccacctcctcgggcggctcggcctcggcgggcgcggggctgtgggccgcgctctatgactacgaggctcgcggcgaggacgagctgagcctgcggcgcggccagctggtggaggtgctgtcgcaggacgccgccgtgtcgggcgacgagggctggtgggcaggccaggtgcagcggcgcctcggcatcttccccgccaactacgtggctccctgccgcccggccgccagccccgcgccgccgccctcgcggcccagctccccggtacacgtcgccttcgagcggctggagctgaaggagctcatcggcgctgggggcttcgggcaggtgtaccgcgccacctggcagggccaggaggtggccgtgaaggcggcgcgccaggacccggagcaggacgcggcggcggctgcggagagcgtgcggcgcgaggctcggctcttcgccatgctgcggcaccccaacatcatcgagctgcgcggcgtgtgcctgcagcagccgcacctctgcctggtgctggagttcgcccgcggcggagcgctcaaccgagcgctggccgctgccaacgccgccccggacccgcgcgcgcccggcccccgccgcgcgcgccgcatccctccgcacgtgctggtcaactgggccgtgcagatagcgcggggcatgctctacctgcatgaggaggccttcgtgcccatcctgcaccgggacctcaagtccagcaacattttgctacttgagaagatagaacatgatgacatctgcaataaaactttgaagattacagattttgggttggcgagggaatggcacaggaccaccaaaatgagcacagcaggcacctatgcctggatggcccccgaagtgatcaagtcttccttgttttctaagggaagcgacatctggagctatggagtgctgctgtgggaactgctcaccggagaagtcccctatcggggcattgatggcctcgccgtggcttatggggtagcagtcaataaactcactttgcccattccatccacctgccctgagccgtttgccaagctcatgaaagaatgctggcaacaagaccctcatattcgtccatcgtttgccttaattctcgaacagttgactgctattgaaggggcagtgatgactgagatgcctcaagaatcttttcattccatgcaagatgactggaaactagaaattcaacaaatgtttgatgagttgagaacaaaggaaaaggagctgcgatcccgggaagaggagctgactcgggcggctctgcagcagaagtctcaggaggagctgctaaagcggcgtgagcagcagctggcagagcgcgagatcgacgtgctggagcgggaacttaacattctgatattccagctaaaccaggagaagcccaaggtaaagaagaggaagggcaagtttaagagaagtcgtttaaagctcaaagatggacatcgaatcagtttaccttcagatttccagcacaagataaccgtgcaggcctctcccaacttggacaaacggcggagcctgaacagcagcagttccagtcccccgagcagccccacaatgatgccccgactccgagccatacagttgacttcagatgaaagcaataaaacttggggaaggaacacagtctttcgacaagaagaatttgaggatgtaaaaaggaattttaagaaaaaaggttgtacctggggaccaaattccattcaaatgaaagatagaacagattgcaaagaaaggataagacctctctccgatggcaacagtccttggtcaactatcttaataaaaaatcagaaaaccatgcccttggcttcattgtttgtggaccagccagggtcctgtgaagagccaaaactttcccctgatggattagaacacagaaaaccaaaacaaataaaattgcctagtcaggcctacattgatctacctcttgggaaagatgctcagagagagaatcctgcagaagctgaaagctgggaggaggcagcctctgcgaatgctgccacagtctccattgagatgactcctacgaatagtctgagtagatccccccagagaaagaaaacggagtcagctctgtatgggtgcaccgtccttctggcatcggtggctctgggactggacctcagagagcttcataaagcacaggctgctgaagaaccgttgcccaaggaagagaagaagaaacgagagggaatcttccagcgggcttccaagtcccgcagaagcgccagtcctcccacaagcctgccatccacctgtggggaggccagcagcccaccctccctgccactgtcaagtgccctgggcatcctctccacaccttctttctccacaaagtgcctgctgcagatggacagtgaagatccactggtggacagtgcacctgtcacttgtgactctgagatgctcactccggatttttgtcccactgccccaggaagtggtcgtgagccagccctcatgccaagacttgacactgattgtagtgtatcaagaaacttgccgtcttccttcctacagcagacatgtgggaatgtaccttactgtgcttcttcaaaacatagaccgtcacatcacagacggaccatgtctgatggaaatccgaccccaactggtgcaactattatctcagccactggagcctctgcactgccactctgcccctcacctgctcctcacagtcatctgccaagggaggtctcacccaagaagcacagcactgtccacatcgtgcctcagcgtcgccctgcctccctgagaagccgctcagatctgcctcaggcttacccacagacagcagtgtctcagctggcacagactgcctgtgtagtgggtcgcccaggaccacatcccacccaattcctcgctgccaaggagagaactaaatcccatgtgccttcattactggatgctgacgtggaaggtcagagcagggactacactgtgccactgtgcagaatgaggagcaaaaccagccggccatctatatatgaactggagaaagaattcctgtcttaaactaagtgccttactgttgtttaagcatttttttaaggtgaacaaatgaacacaatgtatctacctttgaactgtttcatgctgctgtgttttcaaaagctgtggccatgttcctaaattagtaagatatatccagcttctcaaaaaatgtatatgattgctgttagccatgtctattgtttttcctctggattcttttcttataacttggaatacacaaaagtataaaacaagagatgtgcaccaatgaaaactatgctgggtcgaattaccttcagcacaatgttaatgttttcgttctcatttatgcctttgtccatttgcacacaacagaaattgtaatgagcttcactatttttgtttctttccttccttttttttcttttttcctttctttcctttttcttgtcttgtttcttgtttttttctcttgtagtttcttttcttaattgtcatttttgcaacaaaaagccaagaaagagctttagtttcttggcaagaataatgtgatattagtaagtaaaggttcttaaaagtctgatgactggaatagatataaagtcctgtttaaactacctaaccttggctgtgggccgataatgcatatgtccagttctcacttaaattatgcaatgatatttctctctgaggaaattatacggaatgtaacttataaaagctttactgaatataagttataagcattttattcattagaactccaaaatagatgttcaaagttcagtccttgccatttgactgagaccacatggtgtgccccttgagtgaggctaatctttaggtttttcctatagaaaacattcttcctccatcagtagccctttatttgatattcagaagtggaaagctttttcattctccagtagaacttttaaaaattgttacagatacctagctcttcacagatatcatgtactgtaaacagtcatgtgtcttaattttattttctctatttgagtgcataattatcctaataatcccaaagacactgacaactcaaggaacagcagtacagtactattagaagttaagtatgttgttgttatttcacatttcatttaattgtggataaatgttagacatctgttgaaataagctcatatggtggaaacgacaactatattatgaattattttcagaaatggatctttgaatagcagatcaggatttaaataataaaattatctatgaatcacttttatggtcatacatatatgatacaaatccagagttattggtgcagaaatggctacccgagagcttggtaaatttgc

SEQ ID NO: 53 - DNA, 5913 bp, Homo sapiens
gggagggtggaagcggcagactcagcggccggctctaccggcgtcccggctcgggcagcgccgaggggcgctcctggtccagctctcctggctcgggggttccttgccgaggcgcccgcgccccgggctcccagcctcggccgccgcggccccgatgccgaggcatggatagagcagcgctgcgcgcggcggcgatgggagagaagaaggagggcggtggcgggggggatgcggcggccgcggagggaggcgcaggggccgcggccagccgggcgctgcagcagtgcgggcagctccagaagctcatcgacatctccatcggcagcctgcgcgggctgcgcaccaagtgcgctgtgtccaacgacctcacccagcaggagatacggaccctggaggcgaagctggtccgttacatttgtaagcagaggcagtgcaagctgagcgtggctcccggtgagaggaccccagagctcaacagctacccccgcttcagcgactggctgtacactttcaacgtgaggccggaggtggtgcaggagatcccccgagacctcacgctggatgccctgctggagatgaatgaggccaaggtgaaggagacgctgcggcgctgtggggccagcggggatgagtgtggccgtctgcagtatgccctcacctgcctgcggaaggtgacaggcctgggaggggagcacaaggaggactccagttggagttcattggatgcgcggcgggaaagtggctcagggccttccacggacaccctctcagcagccagcctgccctggcccccagggagctcccagctgggcagagcaggcaacagcgcccagggcccacgctccatctccgtgtcagctctgcccgcctcagactcccccacccccagcttcagtgagggcctctcagacacctgtattcccctgcacgccagcggccggctgaccccccgtgccctgcacagcttcatcaccccgcccaccacaccccagctgcgacggcacaccaagctgaagccaccacggacgccccccccacccagccgcaaggtcttccagctgctgcccagcttccccacactcacccggagcaagtcccatgagtctcagctggggaaccgcattgatgacgtctcctcgatgaggtttgatctctcgcatggatccccacagatggtacggagggatatcgggctgtcggtgacgcacaggttctccaccaagtcctggctgtcgcaggtctgccacgtgtgccagaagagcatgatatttggagtgaagtgcaagcattgcaggttgaagtgtcacaacaaatgtaccaaagaagcccctgcctgtagaatatccttcctgccactaactcggcttcggaggacagaatctgtcccctcggacatcaacaacccggtggacagagcagccgaaccccattttggaaccctccccaaagcactgacaaagaaggagcaccctccggccatgaatcacctggactccagcagcaacccttcctccaccacctcctccacaccctcctcaccggcgcccttcccgacatcatccaacccatccagcgccaccacgccccccaacccctcacctggccagcgggacagcaggttcaacttcccagctgcctacttcattcatcatagacagcagtttatctttccagacatttcagcctttgcacacgcagccccgctccctgaagctgccgacggtacccggctcgatgaccagccgaaagcagatgtgttggaagctcacgaagcggaggctgaggagccagaggctggcaagtcagaggcagaagacgatgaggacgaggtggacgacttgccgagctctcgccggccctggcggggccccatctctcgcaaggccagccagaccagcgtgtacctgcaggagtgggacatccccttcgagcaggtagagctgggcgagcccatcgggcagggccgctggggccgggtgcaccgcggccgctggcatggcgaggtggccattcgcctgctggagatggacggccacaaccaggaccacctgaagctcttcaagaaagaggtgatgaactaccggcagacgcggcatgagaacgtggtgctcttcatgggggcctgcatgaacccgccccacctggccattatcaccagcttctgcaaggggcggacgttgcactcgtttgtgagggaccccaagacgtctctggacatcaacaagacgaggcaaatcgctcaggagatcatcaagggcatgggatatcttcatgccaagggcatcgtacacaaagatctcaaatctaagaacgtcttctatgacaacggcaaggtggtcatcacagacttcgggctgtttgggatctcaggcgtggtccgagagggacggcgtgagaaccagctaaagctgtcccacgactggctgtgctatctggcccctgagattgtacgcgagatgacccccgggaaggacgaggatcagctgccattctccaaagctgctgatgtctatgcatttgggactgtttggtatgagctgcaagcaagagactggcccttgaagaaccaggctgcagaggcatccatctggcagattggaagcggggaaggaatgaagcgtgtcctgacttctgtcagcttggggaaggaagtcagtgagatcctgtcggcctgctgggctttcgacctgcaggagagacccagcttcagcctgctgatggacatgctggagaaacttcccaagctgaaccggcggctctcccaccctggacacttctggaagtcagctgacattaacagcagcaaagttgtaccccggtttgaaaggtttggcttgggcgtcctggagtccagtaatccaaagatgtagccagccatatggtttttcgctgctgatctctttctttttaaaatgtgtttctgaaacatcccaacaaccaccacgacaaaaaaacactgcctgcccagcgctgcaaaccaggagcacacgtcctagattcagactgttggccataaaccccactcgggagatggagctgcacctgctatttcttaaaatgacaccaccaacaaccaaacctgtcatgacagacagcaaatgtttacacgtatatttctcctgagtgaacctgatgttttacaataggtaataataaaaacagtctgtgcagatgcactggcactgacggccaggatggcggaaatggccatcccctctgaggaccttgtaggcggtgagggacccatgctgggccagaaggaagacaaacatggtaattgcagctgttcttggggtagggcggggagcccagaaggtctgatctggcctctgctttttggcccaagactccatcagggaaatctatctagggctctccccttgtcctttcaaagggatactgccccttcctcgtcttgcagaggaaaccctggctgagaactgagctagtttatggagtctggaattcctggagagcttgggttcaccttctcacccctgtaatccaggctgctcctgctggaaaagtagaaacagaatccaaaaaaggtctggactcacccggtggttcccagccagggtttctgctgcaaggtgaggaaacatccatggcttgtacagatgtgagtctttgatgaagcccccaggcaggcaccaaggtgatgggactcagggccttggcttttagatacatcccagtccctgactgacatctgaccatgagggctggatgggtgggaacaaggaggagtagatggcaaaagtacctgagcccacttcccagccacagggtgaccctggcactgtaaaaaccctttgtcagtcatgccagaaggttctagaactgcccacctcttccatttcagtcctgctgaaaccccttagcctatttccgactcctctgtccatgctctgagttcagctgggcagtgtgtgggctatcacccctttcatttagacctacctagctggcccccatctgcagagccttccttagcaccattaggccttctacttgtgtccatttgaagcaggaggggctggatttggaaaagtctttgaagtgagagcaccacgcttgtcttcgttagaaactcttaactgcagaaaaaagttccagatggcaagggagcccttaagtggagattaggttgcattagactccaaaaccagaaaggaaaaagggtgatgggagtggagacgtgattggattcaggcccagaacctgtgaccatgctctgagctcagacttggggagggaggggtgtggctcccaccccttccagttaagacctgcctagcagagccccagtctccagccccttccctagcaccagagtctggtcaaaatgccacagaaaatgagctgctctgccagcaagctgtggagctgcctcctctccaggcctggcatcccttggtcagcccctcctgggagggcacagccgtattacagtgccagtgtgcctggccatcagcatcttcacccttcccagtctgtgtggggaggctgtaaaccccgtggattcagctccgtgtggagtttctgtgctatggtgggactgctcattttgccccatcatccctttggcctcccacacacctgccccttcccagggatcacgtgtgtctccagcctttcacctttctattgcaatggtggcctttgtccaggcaagagcaggcctgatggatgtactggtgagccccacagttggatgtcagctcagccgtccaactgggaggaacagtaggctcagttcctccctgacccctgacaccaggccgcagtgggcatgcacaggcccacagaaagtcagtctgggttttgcttttctcgtgagcatcacagttaaagaagcgctcattgagcaactacagtgcacttggtcttctgcaagtgctgggcacctagagataggaacagtcatggtccctgctcttaaggaactgatgacctggtggggccctgttgtcttcaaggaacccagaagccactgggccccaaaggtggaactgaaggactgggggcagctggctctcagcctgccacctctgcactgcctgcctttaaagaaccccaccccaccccatgatggccccctctgttccccttgtatttcagtgactgtgaattgaggttaggaaggcacacctgcccttctgtgtgctctctccacacgaaggatgacagatactgtgaattcagccctcacggccaactgtgaaggggatggagaaggctgggagggctcggggagagctcttaggggctgcggaagtccccacgggggtctgagagtggagcccaagctttggccctccaggcatccccagtttccagcctcacctctgaagccctgctgcctttaaccaccagagccgcagccccctgggtttctgtctaactcgaagtcttgaatcctagctagtttggggttgtgagcagtgtgtagcaaagttgatctctccatgtcaccaaatcaaaacaccctctgtcatcctacggcatttcctcttgaggtcacagagaggaatggcaagccctggaaacctgtgttattctgtgttgatttggtgtggggggagggtggagacgtaaatgtgaagccagttggagtttgtgctatgcagcagtgttagccaggatctcatcagcgtgcaaacctagcatcttctgtggccacaagccacacacttgctttttttgaatgtgatgtaaaatttgtacagtaaagtttttatattttctatcaactacatttgtcttccagacatgctattaatttaaattaaaatggttagtattaacaaacatgctgtatcgggtttttttgccactggcaagaacatgccctctgtgctaagccaggcctgggtgtctggagtttgtgaataaagttataccaaggtg

SEQ ID NO: 54 - DNA, 2994 bp, Homo sapiens
atgggagctgcagggcagatgcaggcttcctctctgactagggcacagctggctgcaggaaaggaggaggaggggaagggggttgcagagcaagcgatggatgaggaaaacatgacgaaaagcgaggagcagcagcctctgagtttgcaaaaagccttacagcagtgcgaactggtccaaaacatgatagacttgagcatctccaacctggaagggcttaggaccaaatgtgctacctccaacgacctcacacaaaaagaaatccggaccctggagagcaagctggtgaagtacttcagccggcagctgtcctgcaaaaagaaggtagccttgcaggagcgcaacgcggagctggacggcttcccccagctacggcactggttccgaatcgtcgatgtgcgcaaggaggtcctggaggaaatctcccccggccagctgagcctggaggacctcttggagatgacggatgaacaggtgtgcgagactgtggagaaatacggagccaaccgggaggagtgtgcccgcctcaacgcctccctctcctgcctcaggaatgtccacatgtcaggaggcaacctttccaaacaagactggaccatccagtggcccaccacagagacggggaaggagaacaatcccgtgtgccccccggagcccaccccgtggatccgcacccatctctcccagagccccagggtcccgtccaagtgcgtccagcactattgtcacaccagccccactcccggggcccctgtgtacacccacgtggacaggcttaccgtggacgcctacccgggcttgtgcccgcccccgccactggagtcgggccaccgttccctgcccccatcgccccggcagcggcacgcggtccgcaccccgccgcgcacccccaacatcgtcaccaccgtgaccccgccgggcacgccgcccatgaggaagaagaacaagctgaagcccccggggaccccaccgccctcctcccgaaaactgatacacttgatcccgggattcaccgcgctgcatcggagcaaatcccacgagttccagctggggcaccgcgtggacgaggcccacacgcccaaagccaagaagaagagcaaacccttgaacctcaagatccacagcagcgtaggcagctgcgagaacatcccctctcagcagcgctccccgctgctgtccgagcgctccctccgctccttctttgtgggacacgcacctttcctgccttccacccctcctgttcacactgaggccaacttctctgcaaacacactgtcagtgccacgctggtccccgcagatccctcgcagagatcttggcaactccatcaagcacaggttttccaccaagtactggatgtctcagacgtgcacagtctgtgggaaagggatgctttttggcctcaagtgtaaaaactgcaagttaaagtgccacaacaaatgcaccaaagaagccccaccctgtcatcttctgatcatccaccgaggagatccagcaaggttagtccggacagagtccgttccgtgtgacatcaacaaccctctacggaagccacctcgctattcagacctgcacatcagtcagacgctccccaaaaccaacaaaatcaacaaggaccacatccctgtcccttaccagccagactccagcagcaacccctcctccacgacgtcctccacgccctcctcgccagcaccccccctccctcctagtgccacgccgccttctcccctacacccttccccacagtgcacacggcagcagaagaacttcaacctgccagcatcccactactacaaatacaagcagcagttcatcttcccagatgtggtgccggtgccggagacgccgacccgggcgccccaggtcatcctgcatccggtgacctcgaatccaatcttggaaggaaatccattacttcaaattgaagtggagccaacgtcggagaatgaagaggtccatgatgaggccgaagagtcagaggatgacttcgaggagatgaacctgtccctcctctcggcccggagcttcccacgcaaggccagccagaccagcatcttccttcaggagtgggacatcccctttgagcagctggagatcggcgagctcattggaaagggccgctttgggcaagtgtaccacggccgctggcatggcgaggtggccatccggctgattgacattgagagggacaacgaggaccagctcaaggccttcaagcgggaggtgatggcctacaggcagacacggcatgagaacgtggtgcttttcatgggtgcctgcatgagcccgcctcacctggccatcatcaccagcctctgtaagggacggacgctctattccgttgtgagggatgccaaaatcgttttggatgtcaacaaaaccaggcagattgctcaagaaattgtgaagggcatgggctacctccacgccaagggaatcctacacaaggacctcaagtcaaagaacgtcttctatgacaacggcaaagtggtcatcacggactttggactcttcagcatttctggggtgctgcaggctggcaggcgggaggacaaactgcgcatccagaatggctggctatgccacctggcaccagagatcatccgccagctgtcccccgacacagaggaggataagctccccttctccaagcactctgacgtctttgcccttggcacaatctggtatgaactccacgccagggaatggcctttcaagacccaaccagcagaggcaataatctggcaaatgggcacaggcatgaaacccaacctcagccagattggcatgggaaaagaaatctcggacattcttctcttctgctgggcctttgaacaagaagagagacctaccttcaccaagctcatggacatgctggagaaactgccaaagcgaaaccgtcgcctgtctcaccctggacatttctggaagtctgcagagctgtgacctttggacatcgggacggcgcccagctgcctgggctcccgtcac

SEQ ID NO: 55 - DNA, 4429 bp, Homo sapiens
cgccgcccgggccactgcaggtgccgctaacggtccggcgcccctcggcgtccgcgcgcccccagcctggcggacgagcccggcggcggagatgggggcgacgggggcggcggagccgctgcaatccgtgctgtgggtgaagcagcagcgctgcgccgtgagcctggagcccgcgcgggctctgctgcgctggtggcggagcccggggcccggagccggcgcccccggcgcggatgcctgctctgtgcctgtatctgagatcatcgccgttgaggaaacagacgttcacgggaaacatcaaggcagtggaaaatggcagaaaatggaaaagccttacgcttttacagttcactgtgtaaagagagcacgacggcaccgctggaagtgggcgcaggtgactttctggtgtccagaggagcagctgtgtcacttgtggctgcagaccctgcgggagatgctggagaagctgacgtccagaccaaagcatttactggtatttatcaacccgtttggaggaaaaggacaaggcaagcggatatatgaaagaaaagtggcaccactgttcaccttagcctccatcaccactgacatcatcgttactgaacatgctaatcaggccaaggagactctgtatgagattaacatagacaaatacgacggcatcgtctgtgtcggcggagatggtatgttcagcgaggtgctgcacggtctgattgggaggacgcagaggagcgccggggtcgaccagaaccacccccgggctgtgctggtccccagtagcctccggattggaatcattcccgcagggtcaacggactgcgtgtgttactccaccgtgggcaccagcgacgcagaaacctcggcgctgcatatcgttgttggggactcgctggccatggatgtgtcctcagtccaccacaacagcacactccttcgctactccgtgtccctgctgggctacggcttctacggggacatcatcaaggacagtgagaagaaacggtggttgggtcttgccagatacgacttttcaggtttaaagaccttcctctcccaccactgctatgaagggacagtgtccttcctccctgcacaacacacggtgggatctccaagggataggaagccctgccgggcaggatgctttgtttgcaggcaaagcaagcagcagctggaggaggagcagaagaaagcactgtatggtttggaagctgcggaggacgtggaggagtggcaagtcgtctgtgggaagtttctggccatcaatgccacaaacatgtcctgtgcttgtcgccggagccccaggggcctctccccggctgcccacttgggagacgggtcttctgacctcatcctcatccggaaatgctccaggttcaattttctgagatttctcatcaggcacaccaaccagcaggaccagtttgacttcacttttgttgaagtttatcgcgtcaagaaattccagtttacgtcgaagcacatggaggatgaggacagcgacctcaaggagggggggaagaagcgctttgggcacatttgcagcagccacccctcctgctgctgcaccgtctccaacagctcctggaactgcgacggggaggtcctgcacagccctgccatcgaggtcagagtccactgccagctggttcgactctttgcacgaggaattgaagagaatccgaagccagactcacacagctgagaagccggcgtcctgctctcgaactgggaaagtgtgaaaactatttaagataattattacagaccaattatgttgatatatacatttaaatgtagaaatttatttttgatagttaaatcttgattttagaagaaaacccttttgtcaacaattttgtgtacatatttggcattttcagttctgtacgcatctgcgggttgcagcccacgccgcttactctcagcggatgcagctgctcacttgggggcactggcctcttaggttttaacgatgtcaacagtgtagtttagaaaatggcccgttagtggctctattgcaataatgttagggacattatatgatttccacgcaggtcacaccatctgggcctgaggtagcagtgggtcactttgatccactttgcaggacttattctgtaacggtttgtggccaagttttgggaagtggttgattctctttgccttcatttcaccttcctcttcgtttacggttaggacatcgctgcttgatccttacaatactgtgcaactgcaatgcaacgtggccctgcttcaggtgatccgcgggaggggcctccacgccagcgccgggaaggctgctggggcctccacacctgcctcatcacggcggcgaggctacgacaatccggctgggagcatgaccttggcgtctgttctgggagcacagatgataagctctggaagctggcagtgtgtaaagcactggcaagtttgttactgttaaaatgtcaaataccaatgctttatatcgacgcgaagtgcttaacacagccgggcttgggggcagtcaggaggaagctggccatccgtggaggaggggccggtcctggactcccgcaggactcctctgatgcagggcctgaagtctgtacacgtggtccagatttgtccttgtcttttcttcacactgagttctctatatttattgaacatcttgtccttttaagccagagtagtgtaaactgcgtctcggatgtctgtcttttgcctcgaagccacgatggatcgctggtttcctctgcagcgcgagggctccggcgaccagaggattcttcccggaaggcattcctgccgcgctccccggggcacccctcaattgtgtactacgtccttgtttagtgtgtatccgtgcccacgtagatgatgtctgtaacgtagttttgtttgaaatatgagaatatgcggcttaaactttgatctgtaaggagcggggccgtggccgtttggagcacgctgtagacaccgttcctcatgctgccgggtgggttttgcagaagctcccttagtgatttcatgtttaacaggcagcatccattttcagaatttcctggcattgatttatattttgaagcatacaggaaacttctcgtttcctcgtttagccccacccagatcaggtgaaagggcagctttaatggtggtttttatggaccacattatcagagagcactgtgcaagccaaatggttcaataatgaatgaaaattctgggtgtaaagagtaaatatgccctggctctttctaccaatgtttgctcctggttggaaagaaaccaaagatttaagacgggctgctcttccagactggctgtgcctgcctgtgcccagcaacctgtgcagccggcagtgtgcctggtgtcacgccaggaggctgtggctgctgtgggccctctggaattgtgctcctcacaaagtttccccaaaaggttcttctaagcctttattgtccctggtaaatgtttcccggctgggcgcggtggctcacgcctgtaatcccagcactttgggaggccgaggcgggtggatcacctaaggtcaggagtttgagatcagcctgcccaacatggtgaaacctcgtctctactaaaaatacacaacttagccagtcttgttggcgcacgcctgtaatctcagctactagggacgctgaggcaggagaatcgcttgaacccaagaaagaggtggaggttgcggtgagccaagattgcgccactgcactccagcctgggcaaacagagggagactccatcgcccccccccaacaaaaaaaaaagtttcccatacactggcctgccccaaaacccactaacaattttagcaaaacagtccaggccaaagaggaagcatttcatgttcaataagaaacccagccattccgcatggctggttcctgagtggctctggtgatactctccagccacctgctgacattgagaatctcagacctcgggactgctgttgcggtaccgtgtgtctgacacctgccagcagccctttgctatctgcgcgcaggatgggggtgactgcccagacattcccgctagataggctctgatttccggggcagcctttcagatgcggcagacatacaacacctgtactttagagttttaagggaaaaaaaatcagaagtgctggttagatagtaaaaacttaggataacttagaaaggctagttttagcttcctttgtggctccctggtgcaaaacaattagcagttatgcaatggacctgattctagtttattctaattaagaagtgaggccgagtttgacttcgttcctgaatacaatcttgagtaactgggaaagtctgagtgaaaggatggcctcattctctttctaatcttgctggtttcaagattagaaaatggcattatttgatctgaaatgtttgagaagacacgaataaagttacttgggcag

SEQ ID NO: 56 - DNA, 4297 bp, Homo sapiens
tgtgagcagagttcttgaagctccactcctctggggaagccgagctgtgtgggagccttcttactgtgccgggagcgtgtgaattggaaaggatcctgagaactggctagtcccagttcctctccggaaaagcagtggctctcgcttcagagatgcgctcagctttcgcctgcatcacactgcattctttaacacattattgaaattacaagcatccaaagcagtttcatgtggacagattgcatattttgaaagcctgaggtattttatcatgaaacatgccatgtggaatctttgaagcatagacctctgcgcaacacctgaataaagaatcttttacctggtatgtgacagagcttctcaccaccaccatgacaaaccaggaaaaatgggcccacctcagcccttcggaattttcccaacttcagaaatatgctgagtattctacaaagaaattaaaggatgttcttgaagaattccatggtaatggtgtgcttgcaaagtataatcctgaagggaaacaagacattcttaaccaaacaatagattttgaaggtttcaaactattcatgaagacattcctggaagccgagcttcctgatgatttcactgcacaccttttcatgtcatttagcaacaagtttcctcattctagtccaatggtaaaaagtaagcctgctctcctatcaggcggtctgagaatgaataaaggtgccatcacccctccccgaactacttctcctgcaaatacgtgttccccagaagtaatccatctgaaggacattgtctgttacctgtctctgcttgaaagaggaagacctgaggataagcttgagtttatgtttcgcctttatgacacggatgggaatggcttcctggacagctcggagctagaaaatatcatcagtcagatgatgcatgttgcagaataccttgagtgggatgtcactgaacttaatccaatcctccatgaaatgatggaagaaattgactatgatcatgatggaaccgtgtctctggaggaatggattcaaggaggaatgacaacgattccacttcttgtgctcctgggcttagaaaataacgtgaaggatgatggacagcacgtgtggcgactgaagcactttaacaaacctgcctattgcaacctttgcctgaacatgctgattggcgtggggaagcagggcctctgctgttccttctgcaagtacacagtccatgagcgctgtgtggctcgagcacctccctcttgcatcaagacctatgtgaagtccaaaaggaacactgatgtcatgcaccattactgggttgaaggtaactgcccaaccaagtgtgataagtgccacaaaactgttaaatgttaccagggcctgacaggactgcattgtgtttggtgtcagatcacactgcataataaatgtgcttctcatctaaaacctgaatgtgactgtggacctttgaaggaccatattttaccacccacaacaatctgtccagtggtactgcagactctgcccacttcaggagtttcagttcctgaggaaagacaatcaacagtgaaaaaggaaaagagtggttcccagcagccaaacaaagtgattgacaagaataaaatgcaaagagccaactctgttactgtagatggacaaggcctgcaggtcactcctgtgcctggtactcacccacttttagtttttgtgaaccccaaaagtggtggaaaacaaggagaacgaatttacagaaaattccagtatctattaaatcctcgtcaggtttacagtctttctggaaatggaccaatgccagggttaaactttttccgtgatgttcctgacttcagagtgttagcctgtggtggagatggaaccgtgggctgggttttggattgcatagaaaaggccaatgtaggcaagcatcctccagttgcgattctgcctcttgggactggcaatgatctagcaagatgcctgcgatggggaggaggttacgaaggtgagaatctgatgaaaattctaaaagacattgaaaacagcacagaaatcatgttggacaggtggaagtttgaagtcatacctaatgacaaagatgagaaaggagacccagtgccttacagtatcatcaataattacttttccattggcgtggatgcctccattgcacacagattccacatcatgagagaaaaacacccagagaaattcaacagtagaatgaagaacaaattttggtattttgagtttggcacatctgaaactttctcagccacctgcaagaagctacatgaatctgtagaaatagaatgtgatggagtacagatagatttaataaacatctctctggaaggaattgctattttgaatataccaagcatgcatggaggatccaatctttggggagagtctaagaaaagacgaagccatcgacgaatagagaaaaaagggtctgacaaaaggaccaccgtcacagatgccaaagagttgaagtttgcaagtcaagatctcagtgaccagctgctggaggtggtcggcttggaaggagccatggagatggggcaaatatacacaggcctgaaaagtgctggccggcggctggctcagtgctcctgcgtggtcatcaggacgagcaagtctctgccaatgcaaattgatggggagccatggatgcagaccccatgcacaataaaaattacacacaagaaccaagccccaatgctgatgggcccgcctccaaaaaccggtttattctgctccctcgtcaaaaggacaagaaaccgaagcaaggaataatcctgtgttgtttcactcttagaaattgaattagcataattgggccatggaacacatatgctggaaatctttgaaccatttcaagtctcctgctcatgcaaaatcatggaagtggtttaacagtttttgttactaagctaatgtaaaattcagctattagaaaatttattgtctcagtttttataggcatctttgcatgaagaaagcagaagtttacctgaagtgatactgcatatttttggtgcatgcattcccatagatttttacatctcccacccaactcttccccaatttccttttactaacctgtgagaaaaacccgtgaaacatgaaaaaggaaataccatgggaaacgtgattctcagtgtgattccaattattacgaagcactaatcagtaacgctacaatgatcataattgcagattgctatacgtttcccttttagaatcagtgtatcagtgacctatgacttgaggagaaacttttaattcgaagattttattaaatagttgactacaataccttgctatatatacatagtttttcttcaacatcttaactcttctgagtggaaataaaaatatcaggcataaggttttctcatgctgaaaaatagaacgcggtttttattttgcttagttttctttttaattccagaaataagtgaaaacatgttacttgacagtcaagtgtggtaatatggcaagccttgttcctttctgcatgagaatctaggagagaattcataaccacaccaataacgaaatagaagttttaaactatgtgcctaatcaatgtgtttcccaccaaagattcagaaaacaatgcttgagagaaatgggttaatgcataattaattaagcattgtggagcaaatttagggttcctgtgattaattttgtgatgactaaaatgctggaaagcaagtgagttgcccattaattatgattaaaattctcacctttcacagacagacaataagccagacaacacaatcaaagctcaatagatgatttcttgcttttttcagtcatttataaatataggtgtaatttttcatggatcagttaagtacacttgaaggaagtaaatgattgtatcagtttatttctagtataaatgggtacctgtaataatactgagctcttggaagcgaatcatgcatgcaattagctccctcctcctcacctactccactcccatctttatgacatttcaaatgtttatttggaaacaacagcctagatcactgttgaaggtgttcatggcatagttggagtctctgactgtttaaagaaatcacagaacagtacttttcttttagtgtttcattaagcctatgatgtaaaatgaaatgcttctgagcagtcttgtaatattgttcattcatattgacctgcatctcatcattgcatgttttatgttttcaaacatgccataaggaaaacgagtgcctgaactgcatgatttattagtttctctccactctgcattaaagtgctaatgattt

SEQ ID NO: 57 - DNA, 4461 bp, Homo sapiens
cttgttgttgatccgtacccagtgggcagcgccgggagctggaccaagcggccggtgagaggccgctgtagcggtgctcagccacctgtgctgcctgccagggggcgggccgaaacctggaggcccggggggcccagctcccgtagggagccgtgggcgctcggtgcccgggccgggcaggacagaataataagctgaatagaatctgaccattggctttcacctggccaggaccttctatgtagctctccttttgtggcccatgtgctgcatcctctgccctcagtgtgcaactggcccccaacgcaatgtgtgtttgtcaaaccatggaagtggggcagtatggcaagaatgcaagtcgggctggagaccggggagtcctcctggagcccttcatccaccaagtaggcggacacagcagcatgatgcgttacgacgatcacactgtgtgcaagcccctcatctcccgggaacagcgcttttacgagtccctccctcccgaaatgaaggagttcacccctgaatacaaaggcgtggtatctgtctgttttgagggggacagtgatggttacatcaacttagtggcctatccttatgtggaaagtgagactgtggaacaggatgacacaacagaacgggagcaacctcggcgcaaacactcccgccggagcctgcaccggtcaggcagtggcagtgaccacaaggaggagaaagccagcctgtcccttgagacctctgagagctcacaggaggcaaagagtccgaaggtggagctgcacagccactcagaggtccctttccagatgctagatggcaacagtggcttgagttctgagaagatcagccacaacccctggagcctgcgttgtcacaagcagcagctgagccgcatgcgctccgagtccaaggaccgaaagctctacaagttcctcctgcttgagaacgtggtgcaccacttcaagtacccctgcgtgttggacctgaagatgggcacgcggcagcatggcgatgacgcgtcagctgagaaggcagcccggcagatgcggaaatgcgagcagagcacatcagccacgctgggcgtcagggtctgcggcatgcaggtgtaccagctggacacagggcattacctctgcaggaacaagtactatggccgtgggctctccattgaaggcttccgcaatgccctctatcaatatctgcacaatggcctggacctgcgacgtgacctgtttgagcctatcctgagcaaactgcggggcctgaaagctgtgctggagcggcaggcctcttaccgcttctactccagttccctgcttgtcatctatgatggcaaggagtgccgggctgagtcctgcctggaccgccggtctgagatgcgtctcaagcacctggacatggtgctccctgaggtggcgtcatcctgtggccccagcaccagccccagcaacaccagccccgaggcgggtccctcctctcagcccaaggtggatgtccgcatgattgactttgcacacagcacattcaagggcttccgggatgaccccaccgtgcatgatgggccagacagaggctacgtgtttggcctggagaacctcatcagcatcatggaacagatgcgggacgagaaccagtaggccctgttctgggcccccagaaccccttcctctccactgcaggcagggaccattgttctgaacttgccgtgaggacacacagacttgcttttaaagggttatatttctctttggtgtaaactaaaagaaatgtttttagctgtagcctggaatccatatatataaagtgaaggagggcagaccacacgccctctcagccaggctcctcagctttgtggctctgactggtgtgtccaggctgccttaggaaggaagaggtgcccctggtgggcttggcagcagggacagggtgcccttggacattggtttctcttgtctagatctttgagatctgtggctgcagggccctgctgattgtaaggtaaagccctgggctggtgcagggcccctccacgcccactcttcccttgttccccagaagtagagggctctgggtgcccatttcttgggggctttccagtcttatgctgtgggtgtcagctagctctttaataggtgccctcagggcaccacagggctgactgcacaaagctggacccatccttcggtctgaccttagcatggggctagattaatgaagctgggctgaggccaacttatggcagagggcggcgcctgggttccccaggcacctgttggcacgtgacaggttggcacctgtcctattcctgaaacagcctctctcaccaagttcccttgcctaagaaggccactccctcccaccccactgaagtgggggatagtcggtgtcctagcaggcctcagggcctctggtggctctggcccagacagtatttgcagttcttgtgctatgggtgggagtcttcttcctcaagtttcggcagctgtgctgctgctggatgggctgctcctcccagggctcaagggctgtggtccgctcagggtctcatttccccaggccaagttcaaggcagcagccctttgtgaggcgctcttggccctgggcctggagggagaactttaagcttttttgctcacagggacgtggtatgggccctgggtgcaggtgcccacattctgctaatgagagctttgtctgatcagtcctgggtccatcagtttgtccatgtgtccggctgccagcccgtcccttgggatccttcccctggggtgtagccttgttcattagtatatactcattccttcatgctttcctcagcagaacacttccacttctgaggtgagcttttgccccgtgcccttcctccacaggtgttgcctttttataaagacctgatagcagaataaattggtgtttccctgttgacccagcaccatttctgtgggcctagaatatggccctcaacccttagagtggggcagtgagggcttgaggagtgacccttcctttctcatggttttagtcattttggctgccagcccttaatggcacagatctgctgcttctaacagatggccaggaggtgacaccgatttcagccattgccaaggttagcaccctctcctttgagcctagggccacactgttcattgtcactttaggcaagtgcctgtttggctttaaaggtaagcctgccagctgtgagaagccttggtaactgatggactcatttcctggtccttaaagatgcagcctcttaagggctccttgatggatgccatctctcctagcccccagccctggtgccactggtgggcaggttcccattctttggggctgggagggacagcttgcctgtttctggtcacaaattacagtcttctctcctgtaccattctgtggcttcagccatgggggcagtagcccttcattagtgtagatagtcattccctggtagggtggagggtaagacatagggtctggaactgtttgggaccttttggggatgtcctgtgcctcccagattcctagattctgggaggagaggctgccgcattctgctgctcctcacagcgagcaaagctgcacccacttacattcagtattttcctggcactacaaagagtgggaaggcctgggatttgctgctgctcccttagagcagggcccctcttttcagcactttggacacctggagacccagccctgttatttaatggtagtgggcaagtgtgtgtgcatactgtctgccactgctttctccctgccccatgccagagagccctgtccctgccaggcccagccttcttagccccaacttgggaacaaagtgcaacatgggatcatgggttggggtgctcaggtgagccctctctatagtgcttccctgggccaagctgacaccagcccctgagggtggggtgggacgggtggtgcttaaaagaggaaggggaccagtgtagcaacttgccagggaccccacccctccctctctgggcctgtgcagtgagcatggggattcccatcaaggggcctggcacctgtgctagttacgtagccgctgctcacgcgctcactcctgaccacatgcacgttccctagatgcagactgctttgaactttaaagctgtacaatttggttatgtttgtgctgacttaaaatatattttaatgaggaaaaaataatggagaaccctgggaaggacctggttcttttgcttctcggggaactgtaagccctcgcgttctgggaatcgctctctgctgctctttcctggaagctaagcctgtctccaccgcccgaggcctgcgccggtggctcccgccgcagttgcgtttgctttggaccttgcgtgcgggggagggggtgctcggtccgagcccgctcctttctgtacacctagcgctgcccgccccgcttgtgtctgaggtcgtgtatgtcaaaaataaagccgctagaaacgg

SEQ ID NO: 58 - DNA, 2508 bp, Homo sapiens
gtggcgggcgtcagcgcggtggccagcgcgcagaggcgggcgcggaggcggctagaaggtgaccgcggatcccagcttcctgcagccagccctgaaggatggctgccatattgggagacaccatcatggtggctaaaggccttgtcaagctgacccaggcggccgtggaaacccacctgcagcacttgggcatcggaggggagctgatcatggcggccagggccctgcagtccacggctgtggagcagattggcatgttcttggggaaggtgcagggtcaggataaacatgaagaatattttgctgagaacttcggcggcccagaaggggagttccacttctcagtcccgcatgcagccggagcctccacagacttctcttcagcctccgctcccgaccagtcagcgcccccatccctgggtcatgcccacagcgagggcccagctcctgcctacgtggccagtggaccctttagagaagccgggttccccggccaggcctcctcccctctgggcagggccaacgggaggctctttgcaaaccccagagactcattctctgccatgggctttcagcgaaggttcttccaccaggaccaatcccctgttgggggcctcacagccgaggacattgagaaggcccggcaggctaaggctcgccccgagaacaagcagcacaaacagacgctcagcgagcatgcccgggagcggaaggtgcctgtgacgaggattggccggctggccaacttcggaggtctggccgtgggcctgggcttcggggcactggcagaggtcgccaagaagagcctgcgctccgaggacccctcagggaagaaggccgtgctgggttccagtcctttcctgtccgaggccaatgcagagcggatcgtgcgcacgctctgcaaggtgcgtggtgcggcactcaagctgggccagatgctgagcatccaggatgatgcctttatcaacccccacctggctaagatcttcgagcgggtgcggcagagcgcggacttcatgccactgaagcagatgatgaaaactctcaacaacgacctgggccccaactggcgggacaagttggaatacttcgaggagcggcccttcgccgccgcatccattgggcaggtgcacttggcccgaatgaagggcggccgcgaggtggccatgaagatccagtaccctggcgtggcccagagcatcaacagtgatgtcaacaacctcatggccgtgttgaacatgagcaacatgcttccagaaggcctgttccccgagcacctgatcgacgtgctgaggcgggagctggccctggagtgtgactaccagcgagaggccgcctgtgcccgcaagttcagggacctgctgaagggccaccccttcttctatgtgcctgagattgtggatgagctctgcagcccacatgtgctgaccacagagctggtgtctggcttccccctggaccaggccgaagggctcagccaggagattcggaacgagatctgctacaacatcctggttctgtgcctgagggagctgttcgagttccacttcatgcaaacagaccccaactggtccaacttcttctatgacccccagcagcacaaggtggctcttttggattttggggcaacgcgggaatatgacagatccttcaccgacctctacattcagatcatcagggctgctgccgacagggacagggagactgtgcgggcgaaatccatagagatgaagttcctcaccggctacgaggtcaaggtcatggaagacgcccacttggatgccatcctcatcctgggggaggccttcgcctctgatgagccttttgattttggcactcagagcaccaccgagaagatccacaacctgattcccgtcatgctgaggcaccgtctcgtccccccacccgaggaaacctactccctgcacaggaagatggggggctccttcctcatctgctccaagctgaaggcccgcttcccctgcaaggccatgttcgaggaggcctacagcaactactgcaagaggcaggcccagcagtagggctgcgggccacgcccaggccggctccgcgggaactctctccctcagacaggccaaaaaccagtagcgaggtcgtggtgatgctctttttaactcctttgcccaataaggggggtggctgcctggagccccgtagccagcgctttccacggtttctgttgctaaatggttgtagggtgagaagtgcaagaatgaagatgaagccccactgctcggtcagtctgcctccgtgtgtcctctgaaataagcagatgaagatgaaagggcaactttgttttcttctttttcctgatgtgaatgttaagcagaagggagagagtccttactcccttccaatctctgttcagtgcaaaacccagaaacatgaacagatacgattgtgggattttatcatctgtgtagtaggtgtgtgtatgtgtttctagagtgagatttgtgttttctgcccttttcctctccagccgat

SEQ ID NO: 59 - DNA, 5237 bp, Homo sapiens
ggcagaggagaagccgccgctgcccccctcaacccgggaggggggtcccactggctgggcctcaggctcaggggtctcaggggtaatgatgaggcggggcacagggcacagggggctacacttcaggtgagagtacaggcaatgtggctgaaggtggggggcctacttcgggggaccggtggacagctgggccagactgttggttggccttgtggggccctggggcctgggccccaccgctggggaccatgtggaggttcttgggcccaaaagttttaccaggatgggcctgggagaggcctgggtgaggaggacattcgcagggcacgggaggcccgtcccaggaagacaccccggccccagctgagtgaccgctctcgagaacgcaaggtgcctgcctcccgcatcagccgcttggccaactttgggggactggctgtgggcttggggctaggagtactggccgagatggctaagaagtccatgccaggaggtcgtctgcagtcagagggtggttctgggctggactccagccccttcctgtcggaggccaatgccgagcggattgtgcagaccttatgtacagttcgaggggccgccctcaaggttggccagatgctcagcatccaggacaacagcttcatcagccctcagctgcagcgcatctttgagcgggtccgccagagcgccgacttcatgccccgctggcagatgctgagagttcttgaagaggagctcggcagggactggcaggccaaggtggcctccttggaggaggtgccctttgccgctgcctcaattgggcaggtgcaccagggcctgctgagggacgggacggaggtggccgtgaagatccagtaccccggcatagcccagagcattcagagcgatgtccagaacctgctggcggtactcaagatgagcgcggccctgcccgcgggcctgtttgccgagcagagcctgcaggccttgcagcaggagctggcttgggagtgtgactaccgtcgtgaggcggcttgtgcccagaatttcaggcagctgctggcaaatgaccccttcttccgggtcccagccgtggttaaggagctgtgcacgacacgggtgctgggcatggagctggctggaggggtccccctggaccagtgccagggcctaagccaggacctgcggaaccagatttgcttccagctcctgacgctgtgtctgcgggagctgtttgagttccgattcatgcagactgaccccaactgggccaacttcctgtatgatgcctccagccaccaggtgaccctgctggactttggtgcaagccgggagtttgggacagagttcacagaccattacatcgaggtggtgaaggctgcagctgatggagacagagactgtgtcctgcagaagtccagggacctcaaattcctcacaggctttgaaaccaaggcattctccgacgcccacgtggaggcagtgatgatcctgggggagcctttcgccacccagggcccttatgactttgggtcgggggaaacggcccgccgcatacaggacctcatcccggtgctgctgcggcaccggctgtgtcccccacccgaggagacctatgccctgcaccgcaagctggcaggggctttcctggcctgtgcccacctccgagcccacatcgcctgcagggacctcttccaggacacctaccaccgctactgggccagtcgccagccagacgcagccactgccggcagcctccccaccaaaggggactcctgggtggatccctcatgacagcctccatgggggattcagtccccagagcaggccgtaccctgctgtagtgcctcttatcccttccccgtctgccctgggtcagaggagcccccttgggcttcccagtcttgcctggctctcctccttggcccaggagctcaggatccctggggctggggaactcccaacttcgtgccctagatcctgcacctccccactcgaaagtgggtatccgaaaactaagccagggaagcggttaacttatctttgccaacatttgagggagccttgggccgctgcatgtcgttatgcagatcagactcatcagggggagccctcacctctgcctcaagcctcccgtggaaggcgagatggtcctggaggcagtcctcacctctgcctccctcgctcctccaacagctgccttctcccgggttccagcctctcagtgtgttggagagacggggcgggcaccatgaacaagttacggcagagcctgcggcgggaggaagccagcctacgtgcccgaggcgtcgcgcccgcaccagtggcaggcagacgaggacgcggtgcggaagggcacgtgcagcttcccggtcaggtacctgggtcacgtggaggtagaggagtcccggggaatgcacgtgtgtgaagatgcggtgaagaagctgaaggcgatgggccgaaagtccgtgaagtctgtcctgtgggtgtcagccgatgggctccgagtggtggacgacaaaaccaaggatcttctggtcgaccagaccatcgaaaaggtctccttttgtgctcctgaccgcaacctggacaaggctttctcctatatctgtcgtgacgggactacccgccgctggatctgccactgttttctggcactgaaggactccggcgagaggctgagccacgctgtgggctgtgcttttgccgcctgcctggagcgaaaacagcgacgggagaaggaatgtggggtcacggccgccttcgatgccagccgcaccagcttcgcccgcgagggctccttccgcctgtctgggggtgggcggcctgctgagcgagaggccccggacaagaagaaagcagaggcagcagctgcccccactgtggctcctggccctgcccagcctgggcacgtgtccccgacaccagccaccacatcccctggtgagaagggtgaggcaggcacccctgtggctgcaggcaccactgcggccgccatcccccggcgccatgcacccctggagcagctggttcgccagggctccttccgtgggttcccagcactcagccagaagaactcgcctttcaaacggcagctgagcctacggctgaatgagctgccatccacgctgcagcgccgcactgacttccaggtgaagggcacagtgcctgagatggagcctcctggtgccggcgacagtgacagcatcaacgctctgtgcacacagatcagttcatcttttgccagtgctggagcgccagcaccagggccaccacctgccacaacagggacttctgcctggggtgagccctccgtgccccctgcagctgccttccagcctgggcacaagcggacaccttcagaggctgagcgatggctggaggaggtgtcacaggtggccaaggcccagcagcagcagcagcagcaacagcagcagcagcagcaacagcagcaagcagcctcagtggccccagtgcccaccatgcctcctgccctgcagcctttccccgcccccgtggggccctttgacgctgcacctgcccaagtggccgtgttcctgccacccccacacatgcagcccccttttgtgcccgcctacccgggcttgggctacccaccgatgccccgggtgcccgtggtgggcatcacaccctcacagatggtggcaaacgccttctgctcagccgcccagctccagcctcagcctgccactctgcttgggaaagctggggccttcccgccccctgccatacccagtgcccctgggagccaggcccgccctcgccccaatggggccccctggccccctgagccagcgcctgccccagctccagagttggacccctttgaggcccagtgggcggcattagaaggcaaagccactgtagagaaaccctccaaccccttttctggcgacctgcaaaagacattcgagattgaactgtagcccgagccgccccacccactccatcatctccaggtgccccacgcctgggggtggaggcacaacctctcccctaaccctgctccctggggctgcgcccctcaacaccctctcaacacccccctccctcaaccaccccgacaaccactacagaaccaacattgtgacgcccaggttgcaacaggatggaattcagggacggacccagcctggctaagggaaccatttcactgccggacttaggctggcaatgcccccttccccaaccccagacacaggggttggccacaatcccactgaatgcccttggttcacactccatttcccagtttctgttgacccccaccttccagtgttggacaggatggaggggggacacttgcttaggggctctcctgggccccacaccagtgcccaccccaaatctggtcgtctcctccccccatgcacagcacaagctaagggctgccctctgcccacacgctgcgttcactgccaatgctgtactcacctccatcaccctccaactttggggcccatgtcttccttgggccaaggtctcatgggggctagggccaagttgggggcccaggaggcggggagggaggaggaggagaagatgcgcagttacctcatgtcggtgcccgctggggaggggtccgggaagaaggggaaggggtgcctggcaggtacttttctatcttttatttccagattttttttgtatctaaacttgaagatttgtattatacaaggacagccaataaaggaagaatataatggtgcccctcgggaaacgagggtgtgtgtagggcgctggtgaggccctagaacctttcctcctgagtcatggactgaaacagagtcagaaggatgtccctgagtgataacctctgagtcatagcgtggtaacaggtaccactgactcagcacctgccaggcgggtattaaaggagccaaaattaatcaccccatttctattccttacagagttagaatcaaggaataaaaaacaaatattatgaactgctggctgggcacagtggctcacgcctgtaatcccagcactttgggaggtcgaggcaggcagatcacttaaggtcaggagttcgagaccagcctggccgccatggagaaacccagtctctaccaaaaattcaaaaattagccgggcgtggtggcaggcgcctgtaattccaggaggctgaggcacaagaatcgcttgaacccgggcagcagaggttgcagtgacctgaggtcaaccattgcactcctgcctgggcaacagaatgagactctgtctcaaaaaaa

SEQ ID NO: 60 - DNA, 1368 bp, Homo sapiens
atggccagaaaggctctcaagcttgcttcgtggaccagcatggctcttgctgcctctggcatctacttctacagtaacaagtacttggaccctaatgactttggcgctgtcagggtgggcagagcagttgctacgacggctgtcatcagttacgactacctcacttccctgaagagtgtcccttatggctcagaggagtacttgcagctgagatctaagatccatgatttgttccagagcttcgatgacacccctctggggacggcctccctggcccaggtccacaaggcagtgctgcatgatgggcggacggtggccgtgaaggtccagcacccaaaggtgcgggctcagagctcgaaggacattctcctgatggaggtgctcgttctggctgtgaagcagctgttcccagagtttgagtttatgtggcttgtggatgaagccaagaagaacctgcctttggagctggatttcctcaatgaagggaggaatgctgagaaggtgtcccagatgctcaggcattttgacttcttgaaggtcccccgaatccactgggacctgtccacggagcgggtcctcctgatggagtttgtggatggcgggcaggtcaatgacagagactacatggagaggaacaagatcgacgtcaatgagatctcacgccacctgggcaagatgtatagtgagatgatcttcgtcaatggcttcgtgcactgcgatccccaccccggcaatgtactggtgcggaagcaccccggcacgggaaaggcggagattgtcctgttggaccatgggctttaccagatgctcacggaagaattccgcctgaattactgccacctctggcagtctctgatctggactgacatgaagagagtgaaggagtacagccagcgactgggagccggggatctctaccccttgtttgcctgcatgctgacggcgcgatcgtgggactcggtcaacagaggcatcagccaagctcccgtcactgccactgaggacttagagattcgcaacaacgcggccaactacctcccccagatcagccatctcctcaaccacgtgccgcgccagatgctgctcatcttgaagaccaacgacctgctgcgtggcattgaggccgccctgggcacccgcgccagcgccagctcctttctcaacatgtcacgttgctgcatcagagcgctagctgagcacaagaagaagaatacctgttcattcttcagaaggacccagatctctttcagcgaggccttcaacttatggcagatcaacctccatgagctcatcctgcgtgtgaaggggttgaagctggctgaccgggtcttggccctaatatgctggctgttccctgctccactctga

SEQ ID NO: 61 - DNA, 1832 bp, Homo sapiens
gctttgcggctgtcgtcggagaggcatctgggttcggactggggccgccatggggaaagtgaatgtggccaagttgcgttacatgagccgagatgacttcagggtcttgaccgcggttgaaatgggcatgaagaaccatgaaattgttcccggcagtttgattgcttctatagccagccttaaacatggtggctgtaataaagttttaagagaattagtgaaacataaactcatagcttgggagcgtaccaaaactgtccagggctatcggttgacaaatgcaggatatgattacctagctttgaaaacactttcttctaggcaagtagttgagtctgttggaaaccagatgggtgttggcaaagaatcagatatttacattgttgcaaatgaagaaggacaacaatttgcattaaagcttcacagactaggaagaacctcgtttcgaaatttgaaaaacaaacgcgattatcataaacataggcacaatgtgtcttggctttatttatctcgtctctctgccatgaaggaatttgcctatatgaaggcattgtatgagaggaaatttccagttccaaagccaattgattacaatcgtcatgcagtggtcatggaactcataaatggttatccactatgtcagatacaccatgttgaagatcctgcatcagtatatgatgaagctatggaactaattgtcaaacttgcaaatcatgggctgattcatggagattttaatgaatttaatctcattttggatgaaagtgaccatatcaccatgattgattttccacagatggtttcaacttctcatcccaatgctgagtggtattttgacagagatgttaaatgcattaaagatttctttatgaaacgtttcagctacgaaagtgagctttttccaacttttaaggatatcaggagagaagacactcttgatgtggaggtttctgccagtggctacacaaaggaaatgcaggcagatgatgaactgcttcatccattaggtccagatgataaaaatattgaaacaaaagagggatctgaattctcattttcagatggagaagtggcagaaaaagcagaggtttacaggtcagaaaatgaaagtgaacggaactgtctagaagaatcagagggctgctattgcagatcatctggagaccctgaacaaataaaggaagacagtttatcagaagagagtgctgatgcacggagttttgaaatgactgaattcaatcaagctttagaagaaataaaagggcaggttgttgaaaacaactctgtaactgaattttctgaggagaaaaacagaactgaaaattacaacaggcaagatggtcagagagttcaaggaggagtccctgctggctctgacgagtatgaagatgaatgccctcatctaattgccttgtcgtcattaaatagagaattcaggcctttcagagatgaagaaaatgtgggagctatgaatcagtatagaacaagaactctgagtatcacttcttcaggcagtgctgtaagctgttcaacaattcctccagaactggtgaaacagaaggtgaaacgtcagttgacaaaacagcaaaaatcagctgtcagacgtcgattgcagaaaggagaagcaaatatatttaccaagcaacgtagggaaaacatgcaaaatatcaaatcaagtttggaagcagctagcttttggggagaataatatatttaggatcttggatatgtttaatatattttttaaagttactgtaattcctttttgagccctcatttgtcttttttgagccaaggctatcatatattaataaataaaccctctttcatct

SEQ ID NO: 62 - DNA, 4693 bp, Homo sapiens
ggactgcgggataggaagctggggatatggacaagcagcagcgttatagcgctctgggtttcgggacataggcctgggccatgcggcccccttggccccttggcgcgacccccaggaacgttcggaaagctggtcctcgtggctgggggaaaggcggggggtgggggggaagcgggcacgtgaccccggtcagccaatctgggtgctgctgacgtggccgcgcggccccgatgctctccccacccccccagcccgttccggaagggaggggctgggggctacgccccctcccccagcacggcttcgttttctgggggggggttgacaccccggattacataccccgtaccaagccgagggcaactttggaggccccctggaaggctttaggatccagattcttcgctgctgctgccttaccgccgagaaccaccacccgccaggcgtcttgcggccacacccctggcgggttcaggcaggctacgcccacgcgacccctcccgtttccctgctttggccaatggaggagctacgaatggcacgacctgctcgagcttggcagtctccagttgggctgtgcatggaagcttgggaagactttgttggaaggggaggcggggagagagtgctggaggctctggggcgatggcttccgcacctcttccaaccaccctctttccctggagtcggcggaccacagctcagccaattggcttggagatgtggcgggttgccacttccctgtgggtctctgcggcactcttctgcctggtgactgacaccttggaaatgaagtttatgacgtcatcgctgcggctggccaatagaaaaagctcccgcggagaggtgttccttccccttcgactcagcttcttcacccgcgtgagcgagcgcgcgcgcgcggagggggtggggaaaatctcaagcagggtggcgcgcatgagcggcgaagctcctcctccccgcctatatataaagggctggcgcggggctcggcggcgccatttcgtgctggagtggagcagcctctagaacgagctggaggattctgcctaccgatacagagccttcgagtcgtccggggccgccattacaatccacctccatccgcttggaaatggccttcgtcccggcctatgactggtcccagcgggcagtacagaccccctagaagcccctggagctcccctttttcgggccccgcccaatcctcggagtctgtccaccccctctactccgccctcaagaggatttcaaagatggaggcggcggctccctaaaccacttttcgtgttcatccgcctccatccgagatcgaaacgggacctcgtcggccccgtaggggcccgacaagaagagggaatccctgcagaccaacagcgggctatattgacgacggtgtctgagatcggggaccgtcttttgaagagtcagtccctccttagttgcccgcctcagctgaggccgccgccattttcttgctgtccgccgtctgcagagcgcgccaagctgcccggagctctccgagaggccccaaagagactgctttcgtgccggccaggcagggggtttgtcgcctggaggcccaagaggaacggcctccccccaacttagcgggttatgctggaccgggcggtgagggaaaccgaggccacccggactttccgcggctgagggcagcgccggttccttgcggtcaagatgctgcaaaacgtgactccccacaataagctccctggggaagggaatgcagggttgctggggctgggcccagaagcagcagcaccagggaaaaggattcgaaaaccctctctcttgtatgagggctttgagagccccacaatggcttcggtgcctgctttgcaacttacccctgccaacccaccacccccggaggtgtccaatcccaaaaagccaggacgagttaccaaccagctgcaatacctacacaaggtagtgatgaaggctctgtggaaacatcagttcgcatggccattccggcagcctgtggatgctgtcaaactgggtctaccggattatcacaaaattataaaacagcctatggacatgggtactattaagaggagacttgaaaacaattattattgggctgcttcagagtgtatgcaagattttaataccatgttcaccaactgttacatttacaacaagcccactgatgatattgtcctaatggcacaaacgctggaaaagatattcctacagaaggttgcatcaatgccacaagaagaacaagagctggtagtgaccatccctaagaacagccacaagaagggggccaagttggcagcgctccagggcagtgttaccagtgcccatcaggtgcctgccgtctcttctgtgtcacacacagccctgtatactcctccacctgagatacctaccactgtcctcaacattccccacccatcagtcatttcctctccacttctcaagtccttgcactctgctggacccccgctccttgctgttactgcagctcctccagcccagccccttgccaagaaaaaaggcgtaaagcggaaagcagatactaccacccctacacctacagccatcttggctcctggttctccagctagccctcctgggagtcttgagcctaaggcagcacggcttccccctatgcgtagagagagtggtcgccccatcaagcccccacgcaaagacttgcctgactctcagcaacaacaccagagctctaagaaaggaaagctttcagaacagttaaaacattgcaatggcattttgaaggagttactctctaagaagcatgctgcctatgcttggcctttctataaaccagtggatgcttctgcacttggcctgcatgactaccatgacatcattaagcaccccatggacctcagcactgtcaagcggaagatggagaaccgtgattaccgggatgcacaggagtttgctgctgatgtacggcttatgttctccaactgctataagtacaatcccccagatcacgatgttgtggcaatggcacgaaagctacaggatgtatttgagttccgttatgccaagatgccagatgaaccactagaaccagggcctttaccagtctctactgccatgccccctggcttggccaaatcgtcttcagagtcctccagtgaggaaagtagcagtgagagctcctctgaggaagaggaggaggaagatgaggaggacgaggaggaagaagagagtgaaagctcagactcagaggaagaaagggctcatcgcttagcagaactacaggaacagcttcgggcagtacatgaacaactggctgctctgtcccagggtccaatatccaagcccaagaggaaaagagagaaaaaagagaaaaagaagaaacggaaggcagagaagcatcgaggccgagctggggccgatgaagatgacaaggggcctagggcaccccgcccacctcaacctaagaagtccaagaaagcaagtggcagtgggggtggcagtgctgctttaggcccttctggctttggaccttctggaggaagtggcaccaagctccccaaaaaggccacaaagacagccccacctgccctgcctacaggttatgattcagaggaggaggaagagagcaggcccatgagttacgatgagaagcggcagctgagcctggacatcaacaaattacctggggagaagctgggccgagttgtgcatataatccaagccagggagccctctttacgtgattcaaacccagaagagattgagattgattttgaaacactcaagccatccacacttagagagcttgagcgctatgtcctttcctgcctacgtaagaaaccccggaagccctacaccattaagaagcctgtgggaaagacaaaggaggaactggctttggagaaaaagcgggaattagaaaagcggttacaagatgtcagcggacagctcaattctactaaaaagccccccaagaaagcgaatgagaaaacagagtcatcctctgcacagcaagtagcagtgtcacgccttagcgcttccagctccagctcagattccagctcctcctcttcctcgtcgtcgtcttcagacaccagtgattcagactcaggctaaggggtcaggccagatggggcaggaaggctccgcaggaccggacccctagaccaccctgccccacctgccccttccccctttgctgtgacacttcttcatctcacccccccccgcccccctctaggagagctggctctgcagtgggggagggatgcagggacatttactgaaggagggacatggacaaaacaacattgaattcccagccccattggggagtgatctcttggacacagagcccccattcaaaatggggcagggcaagggtgggagtgtgcaaagccctgatctggagttacctgaggccatagctgccctattcacttctaagggccctgttttgagattgtttgttctaatttattttaagctaggtaaggctggggggagggtggggccgtggtcccctcagcctccatggggagggaagaagggggagctctttttttacgttgatttttttttttctactctgttttccctttttccttccgctccatttggggccctgggggtttcagtcatctccccatttggtcccctggactgtctttgttgattctaacttgtaaataaagaaaatatt

SEQ ID NO: 63 - DNA, 3085 bp, Homo sapiens
gacggccgccggagccgcgaggccaactgtcgcctggttgggcccggaaatgggacgtcgcgctttctcagggagcgtagaagcagccagggcctctccaagccgctgctgtgacagaaagtgagtgagctgccggaggatgtccaccgccacgacagtcgcccccgcggggatcccggcgaccccgggccctgtgaacccaccccccccggaggtctccaaccccagcaagcccggccgcaagaccaaccagctgcagtacatgcagaatgtggtggtgaagacgctctggaaacaccagttcgcctggcccttctaccagcccgtggacgcaatcaaattgaacctgccggattatcataaaataattaaaaacccaatggatatggggactattaagaagagactagaaaataattattattggagtgcaagcgaatgtatgcaggacttcaacaccatgtttacaaattgttacatttataacaagcccacagatgacatagtgctaatggcccaagctttagagaaaatttttctacaaaaagtggcccagatgccccaagaggaagttgaattattaccccctgctccaaagggcaaaggtcggaagccggctgcgggagcccagagcgcaggtacacagcaagtggcggccgtgtcctctgtctccccagcgaccccctttcagagcgtgccccccaccgtctcccagacgcccgtcatcgctgccacccctgtaccaaccatcactgcaaacgtcacgtcggtcccagtccccccagctgccgccccacctcctcctgccacacccatcgtccccgtggtccctcctacgccgcctgtcgtcaagaaaaagggcgtgaagcggaaagcagacacaaccactcccacgacgtcggccatcactgccagccggagtgagtcgcccccgccgttgtcagaccccaagcaggccaaagtggtggcccggcgggagagtggtggccgccccatcaagcctcccaagaaggacctggaggacggcgaggtgccccagcacgcaggcaagaagggcaagctgtcggagcacctgcgctactgcgacagcatcctcagggagatgctatccaagaagcacgcggcctacgcctggcccttctacaagccagtggatgccgaggccctggagctgcacgactaccacgacatcatcaagcacccgatggacctcagcaccgtgaaaaggaagatggatggccgagagtacccagacgcacagggctttgctgctgatgtccggctgatgttctcgaattgctacaaatacaatcccccagaccacgaggttgtggccatggcccggaagctccaggacgtgtttgagatgaggtttgccaagatgccagatgagcccgtggaggcaccggcgctgcctgcccccgcggcccccatggtgagcaagggcgctgagagcagccgtagcagtgaggagagctcttcggactcaggcagctcggactcggaggaggagcgggccaccaggctggcggagctgcaggagcagctgaaggccgtgcacgagcagctggccgccctgtctcaggccccagtaaacaaaccaaagaagaagaaggagaagaaggagaaggagaagaagaagaaggacaaggagaaggagaaggagaagcacaaagtgaaggccgaggaagagaagaaggccaaggtggctccgcctgccaagcaggctcagcagaagaaggctcctgccaagaaggccaacagcacgaccacggccggcagacagctgaagaaaggcggcaagcaggcatctgcctcctacgactcagaggaagaggaggagggcctgcccatgagctacgatgaaaagcgccagcttagcctggacatcaaccggctgcccggggagaagctgggccgggtagtgcacatcatccaatctcgggagccctcgctcagggactccaaccccgacgagatagaaattgactttgagactctgaaacccaccactttgcgggaactggagagatatgtcaagtcttgtttacagaaaaagcaaaggaaaccgttctcagcaagcgggaagaaacaggcagccaagtcgaaagaggagctagctcaggaaaagaagaaggagctggaaaagcgtctgcaggatgtcagcgggcagctgagcagcagcaagaagcccgcccggaaagagaagcccggctcagcaccctcagggggcccgtccaggctcagcagcagcagctcctccgagtctgggagcagcagctccagcgggtccagctctgacagcagtgactcagaatgaactggcttcggacagaacaggacagatggatgtcgcacacgccgagactctgccgtacccctctgtggttcatattactacttctgttccatggtgtgcaggtctgcttcttaattcagtgttatgatatcttccagtttttgctttcataggtcagagatctatcttgtgtgtgcgttagacttgatgagaaggtgtgaactctgcagaaagtctcttcttcatcactgaattcagtcacttggagatgacaacttcaaatgctaacccgatgaccccagaaaaccgtgtgagattcgtaccgaagaaccttgtggaatccctttgcttaggcccaacctggtcgatagctcgagaaagaattttttccaaggaaatgtctcggatatgggtactgtatttgaaagctgttagctttgtcaacacgcattgtccttgtcatttgggccccgagctctgaccctcgtgtctgacgcggccacctctttctggaggggctgaggacagatgtgcctgcttgtggagaccaggctgggcctaagcgaagggtcatcgcagccccagcccggagcgtggagcccttggggggtggtcgggtgggatgtgcgttctccgctcgtggtgatgtcaggagctcctcggagggaacagagcggctgtgtatgcagcctgcaggtttccatacactgaagcttttacctcaactttaaaaaaaaaaaagaagaaaagattaaaaaaaaaaaaaaaaaactcgaggcatctatg

SEQ ID NO: 64 - DNA, 3149 bp, Homo sapiens
attctttggaatactactgctagaagtctgacttaagacccagcttatgggccacatggcacccagctgcttctgcagagaaggcaggccactgatgggtacagcaaagtgtggtgctgctggccaagccaaagacccgtgtaggatgactgggcctctgccccttgtgggtgttgccactgtgcttgagtgcctggtgaagaatgtgatgggatcactagcatgtctgcggagagcggccctgggacgagattgagaaatctgccagtaatgggggatggactagaaacttcccaaatgtctacaacacaggcccaggcccaaccccagccagccaacgcagccagcaccaaccccccgcccccagagacctccaaccctaacaagcccaagaggcagaccaaccaactgcaatacctgctcagagtggtgctcaagacactatggaaacaccagtttgcatggcctttccagcagcctgtggatgccgtcaagctgaacctccctgattactataagatcattaaaacgcctatggatatgggaacaataaagaagcgcttggaaaacaactattactggaatgctcaggaatgtatccaggacttcaacactatgtttacaaattgttacatctacaacaagcctggagatgacatagtcttaatggcagaagctctggaaaagctcttcttgcaaaaaataaatgagctacccacagaagaaaccgagatcatgatagtccaggcaaaaggaagaggacgtgggaggaaagaaacagggacagcaaaacctggcgtttccacggtaccaaacacaactcaagcatcgactcctccgcagacccagacccctcagccgaatcctcctcctgtgcaggccacgcctcaccccttccctgccgtcaccccggacctcatcgtccagacccctgtcatgacagtggtgcctccccagccactgcagacgcccccgccagtgcccccccagccacaacccccacccgctccagctccccagcccgtacagagccacccacccatcatcgcggccaccccacagcctgtgaagacaaagaagggagtgaagaggaaagcagacaccaccacccccaccaccattgaccccattcacgagccaccctcgctgcccccggagcccaagaccaccaagctgggccagcggcgggagagcagccggcctgtgaaacctccaaagaaggacgtgcccgactctcagcagcacccagcaccagagaagagcagcaaggtctcggagcagctcaagtgctgcagcggcatcctcaaggagatgtttgccaagaagcacgccgcctacgcctggcccttctacaagcctgtggacgtggaggcactgggcctacacgactactgtgacatcatcaagcaccccatggacatgagcacaatcaagtctaaactggaggcccgtgagtaccgtgatgctcaggagtttggtgctgacgtccgattgatgttctccaactgctataagtacaaccctcctgaccatgaggtggtggccatggcccgcaagctccaggatgtgttcgaaatgcgctttgccaagatgccggacgagcctgaggagccagtggtggccgtgtcctccccggcagtgccccctcccaccaaggttgtggccccgccctcatccagcgacagcagcagcgatagctcctcggacagtgacagttcgactgatgactctgaggaggagcgagcccagcggctggctgagctccaggagcagctcaaagccgtgcacgagcagcttgcagccctctctcagccccagcagaacaaaccaaagaaaaaggagaaagacaagaaggaaaagaaaaaagaaaagcacaaaagaaaagaggaagtggaagagaataaaaaaagcaaagccaaggaacctcctcctaaaaagacgaagaaaaataatagcagcaacagcaatgtgagcaagaaggagccagcgcccatgaagagcaagccccctcccacgtatgagtcggaggaagaggacaagtgcaagcctatgtcctatgaggagaagcggcagctcagcttggacatcaacaagctccccggcgagaagctgggccgcgtggtgcacatcatccagtcacgggagccctccctgaagaattccaaccccgacgagattgaaatcgactttgagaccctgaagccgtccacactgcgtgagctggagcgctatgtcacctcctgtttgcggaagaaaaggaaacctcaagctgagaaagttgatgtgattgccggctcctccaagatgaagggcttctcgtcctcagagtcggagagctccagtgagtccagctcctctgacagcgaagactccgaaacaggtcctgcctaatcattggacacggactcttaataaaacggtcttcagttccagattccttcccagcaagctatagcttaagtccattttcttccgtgaaagggacaggactccatcaagttatggaattcctcagagccctgggcctgtcccccggggtggattagtcatgtccagcagcacacgcctagtcccgccttcgggaaggctgcctgcctggccagccgcccaggcctctctgtgtaaagactgcctggctgtcctgcccagccttcctggttctctggggtcctctgggtgggtggcatctcctggagggtgatgacaatccccaacacatgcattcatgtggtgctactctgtgtgcaaagccagaccccaagtatgttttctctctttgtcccatccctctttttctgggactttggaccctaactacttccctcctgaaccttgcagtgacatcagtccaggagagctctcgttcagtgtgcggaagaacactctgacctctagagctgtcctagataaggagtgggagctttagaggcaaggcctctagaccctggaaggctcagtgaggctcttcccacagcatgcttctcactggtgccctgtaagctcgagccaccgctgactctgagcctttttggagtctttcctccttcgtctccattgttccgtgcatttccaaagcttaagttgctggtgggcatttccccagtttctatgggctccgtcttctcaagtcacatagggaaagtaccttc

SEQ ID NO: 65 - DNA, 3106 bp, Homo sapiens
gtggcaagatgttcctgggaggtcaagttaagagtcaaaaataattcattagatttaacaatttagcatggacatgtacttgtagacaggattcaaagcagttaagaatgtctctgccaagtcgacaaacagctattattgttaaccctcctccaccagaatatataaatactaagaaaaatgggcgattgacaaatcaacttcagtatctacaaaaagttgtcctaaaggatttatggaagcatagtttttcatggccctttcaacgtcctgtggatgctgtgaaactaaagttgcctgattattataccattataaaaaacccaatggatttaaatacaattaagaagcgcttggagaataaatattatgcgaaggcttcagaatgtatagaagacttcaatacaatgttctcaaattgttatttatataacaagcctggagatgacattgttcttatggcacaagctctagagaagctgtttatgcagaaattatctcagatgccacaagaagagcaagttgtgggtgttaaggaaagaatcaagaaaggcactcaacagaatatagctgtttcttctgctaaagaaaaatcatcacccagcgcaacagaaaaagtatttaagcagcaagaaattccttctgtatttcctaagacatctatttctcccttgaacgtggtacagggagcttcagtcaactccagttcacaaactgcggcccaagttacaaaaggtgtgaagaggaaagcagatacaacaactcctgcaacttcagcagttaaagcaagtagtgaattttctccaacattcacagaaaaatcagtggcactgccacctataaaagaaaatatgccaaagaatgttttgccagattctcagcaacaatataatgttgtggagactgttaaagtaactgaacaattaaggcactgtagtgagattcttaaagaaatgcttgcaaagaaacatttttcatatgcatggcccttttataatcctgttgacgttaatgctttgggactccataactactatgacgttgtcaaaaatccgatggatcttggaactattaaggagaaaatggataaccaagaatataaggatgcatactcatttgcggcagatgttagattaatgttcatgaattgctacaagtacaatcctccagatcacgaagttgtgacaatggcaagaatgcttcaggatgttttcgaaacgcatttttcaaagatcccgattgaacctgttgagagtatgcctttatgttacatcaaaacagatatcacagaaaccactggtagagagaacactaatgaagcctcctctgaagggaactcttctgatgattctgaagatgagcgagttaagcgtcttgcaaagcttcaggagcagcttaaagctgtacatcaacagctccaggttttgtcccaagtacctttccgtaagctaaataaaaagaaagagaagtctaaaaaggaaaagaaaaaagaaaaggttaataacagcaatgaaaatccaagaaaaatgtgtgagcaaatgaggctaaaggaaaagtccaagagaaatcagccaaagaaaaggaaacaacagttcattggtctaaaatctgaagatgaagataatgctaaacctatgaactatgatgagaaaaggcagttaagtctgaatataaacaaactccctggagataaacttgggcgagtagttcacataatacaatcaagagagccttctctgagcaattccaatcctgatgagatagagatagactttgaaacactgaaagcatcaacactaagagaattagaaaaatatgtttcggcatgtctaagaaagagaccattaaaacctcctgctaagaaaataatgatgtccaaagaagaacttcactcacagaaaaaacaggaattggaaaagcggttactggatgttaataatcagttaaattctagaaaacgtcaaacaaaatctgataaaacgcaaccatccaaagctgttgaaaatgtttcccgactgagtgagagcagcagcagcagcagcagctcatcagagtctgaaagtagcagcagtgacttaagctcttcagacagcagtgattctgaatcagaaatgttccctaagtttacagaagtaaaaccaaatgattctccttctaaagagcatgtaaagaaaatgaagaatgaatgcatactgcctgaaggaagaacaggcgtcacacagataggatattgtgtgcaagacacaacctctgccaatactacccttgttcatcagaccacaccttcacatgtaatgccaccaaatcaccaccaattagcatttaattatcaagaattagaacatttacagactgtgaaaaacatttcacctttacaaattctgcctccctcaggtgattctgaacagctctcaaatggcataactgtgatgcatccatctggtgatagtgacacaacgatgttagaatctgaatgtcaagctcctgtacagaaggatataaagattaagaatgcagattcatggaaaagtttaggcaaaccagtgaaaccatcaggtgtaatgaaatcctcagatgagctcttcaaccaatttagaaaagcagccatagaaaaggaagtaaaagctcggacacaggaactcatacggaagcatttggaacaaaatacaaaggaactaaaagcatctcaagaaaatcagagggatcttgggaatggattgactgtagaatctttttcaaataaaatacaaaacaagtgctctggagaagagcagaaagaacatccgcagtcatcagaagctcaagataaatccaaactctggcttctcaaagaccgtgatttagccaggccgaaagaacaagagaggaggaggagagaagccatggtgggtaccattgatatgacccttcaaagtgacattatgacaatgtttgaaaacaactttgattaaaactcagtttttaaattaaccatccacttaaaatgaatggtaaaagatcaaaatgcatatggtaaaatgattgctttcagataacaagataccaatcttatattgtattttgactgctctaaaatgattaaacagttttcacttacaaaaaaaaa

SEQ ID NO: 66 - DNA, 7986 bp, Homo sapiens
ctcggcgccgccgcggccccacgctccgggcccgtcctcgaggcgcgcggcgcggggcgcgggcgccggggcctgaggcggcgggcgacgcccgggggcctgacggccggccccgcgccatggtgtgagcgccgccgcccgtgcacgctccgtccgccctcccgcgcggcccggccggcagagagccccgagcggcccgagagcgcagccgagcccgccgccgccgcccgcggccccgcgaggagagtaccgggccggcccggctgccgcgcgaggagcgcggtcggcggcctggtctgcggctgagatacacagagcgacagagacatttattgttatttgttttttggtggcaaaaagggaaaatggcgaacgactcccctgcaaaaagtctggtggacatcgacctctcctccctgcgggatcctgctgggatttttgagctggtggaagtggttggaaatggcacctatggacaagtctataagggtcgacatgttaaaacgggtcagttggcagccatcaaagttatggatgtcactgaggatgaagaggaagaaatcaaactggagataaatatgctaaagaaatactctcatcacagaaacattgcaacatattatggtgctttcatcaaaaagagccctccaggacatgatgaccaactctggcttgttatggagttctgtggggctgggtccattacagaccttgtgaagaacaccaaagggaacacactcaaagaagactggatcgcttacatctccagagaaatcctgaggggactggcacatcttcacattcatcatgtgattcaccgggatatcaagggccagaatgtgttgctgactgagaatgcagaggtgaaacttgttgactttggtgtgagtgctcagctggacaggactgtggggcggagaaatacgttcataggcactccctactggatggctcctgaggtcatcgcctgtgatgagaacccagatgccacctatgattacagaagtgatctttggtcttgtggcattacagccattgagatggcagaaggtgctccccctctctgtgacatgcatccaatgagagcactgtttctcattcccagaaaccctcctccccggctgaagtcaaaaaaatggtcgaagaagttttttagttttatagaagggtgcctggtgaagaattacatgcagcggccctctacagagcagcttttgaaacatccttttataagggatcagccaaatgaaaggcaagttagaatccagcttaaggatcatatagatcgtaccaggaagaagagaggcgagaaagatgaaactgagtatgagtacagtgggagtgaggaagaagaggaggaagtgcctgaacaggaaggagagccaagttccattgtgaacgtgcctggtgagtctactcttcgccgagatttcctgagactgcagcaggagaacaaggaacgttccgaggctcttcggagacaacagttactacaggagcaacagctccgggagcaggaagaatataaaaggcaactgctggcagagagacagaagcggattgagcagcagaaagaacagaggcgacggctagaagagcaacaaaggagagagcgggaagctagaaggcagcaggaacgtgaacagcgaaggagagaacaagaagaaaagaggcgtctagaggagttggagagaaggcgcaaagaagaagaggagaggagacgggcagaagaagaaaagaggagagttgaaagagaacaggagtatatcaggcgacagctagaagaggagcagcggcacttggaagtccttcagcagcagctgctccaggagcaggccatgttactggagtgccgatggcgggagatggaggagcaccggcaggcagagaggctccagaggcagttgcaacaagaacaagcatatctcctgtctctacagcatgaccataggaggccgcacccgcagcactcgcagcagccgccaccaccgcagcaggaaaggagcaagccaagcttccatgctcccgagcccaaagcccactacgagcctgctgaccgagcgcgagaggtggaagatagatttaggaaaactaaccacagctcccctgaagcccagtctaagcagacaggcagagtattggagccaccagtgccttcccgatcagagtctttttccaatggcaactccgagtctgtgcatcccgccctgcagagaccagcggagccacaggtacagtggtcccacctggcatctctcaagaacaatgtttcccctgtctcgcgatcccattccttcagtgacccttctcccaaatttgcacaccaccatcttcgttctcaggacccatgtccaccttcccgcagtgaggtgctcagtcagagctctgactctaagtcagaggcgcctgaccctacccaaaaggcttggtctagatcagacagtgacgaggtgcctccaagggttcctgtgagaacaacatctcgctcccctgttctgtcccgtcgagattccccactgcagggcagtgggcagcagaatagccaggcaggacagagaaactccaccagcagtattgagcccaggcttctgtgggagagagtggagaagctggtgcccagacctggcagtggcagctcctcagggtccagcaactcaggatcccagcccgggtctcaccctgggtctcagagtggctccggggaacgcttcagagtgagatcatcatccaagtctgaaggctctccatctcagcgcctggaaaatgcagtgaaaaaacctgaagataaaaaggaagttttcagacccctcaagcctgctggcgaagtggatctgaccgcactggccaaagagcttcgagcagtggaagatgtacggccacctcacaaagtaacggactactcctcatccagtgaggagtcggggacgacggatgaggaggacgacgatgtggagcaggaaggggctgacgagtccacctcaggaccagaggacaccagagcagcgtcatctctgaatttgagcaatggtgaaacggaatctgtgaaaaccatgattgtccatgatgatgtagaaagtgagccggccatgaccccatccaaggagggcactctaatcgtccgccagagtacagttgaccaaaagcgtgccagccatcatgagagcaatggctttgccggtcgcattcacctcttgccagatctcttacagcaaagccattcctcctccacttcctccacctcctcctccccatcctccagccagccgacacccaccatgtccccacagacaccccaggacaagctcactgctaatgagactcagtccgctagtagcacactccagaaacacaaatcttcctcctcctttacaccttttatagaccccagattactacagatttctccatctagcggaacaacagtgacatctgtggtgggattttcctgtgatgggatgagaccagaagccataaggcaagatcctacccggaaaggctcagtggtcaatgtgaatcctaccaacactaggccacagagtgacaccccggagattcgtaaatacaagaagaggtttaactctgagattctgtgtgctgccttatggggagtgaatttgctagtgggtacagagagtggcctgatgctgctggacagaagtggccaagggaaggtctatcctcttatcaaccgaagacgatttcaacaaatggacgtacttgagggcttgaatgtcttggtgacaatatctggcaaaaaggataagttacgtgtctactatttgtcctggttaagaaataaaatacttcacaatgatccagaagttgagaagaagcagggatggacaaccgtaggggatttggaaggatgtgtacattataaagttgtaaaatatgaaagaatcaaatttctggtgattgctttgaagagttctgtggaagtctatgcgtgggcaccaaagccatatcacaaatttatggcctttaagtcatttggagaattggtacataagccattactggtggatctcactgttgaggaaggccagaggttgaaagtgatctatggatcctgtgctggattccatgctgttgatgtggattcaggatcagtctatgacatttatctaccaacacatgtaagaaagaacccacactctatgatccagtgtagcatcaaaccccatgcaatcatcatcctccccaatacagatggaatggagcttctggtgtgctatgaagatgagggggtttatgtaaacacatatggaaggatcaccaaggatgtagttctacagtggggagagatgcctacatcagtagcatatattcgatccaatcagacaatgggctggggagagaaggccatagagatccgatctgtggaaactggtcacttggatggtgtgttcatgcacaaaagggctcaaagactaaaattcttgtgtgaacgcaatgacaaggtgttctttgcctctgttcggtctggtggcagcagtcaggtttatttcatgaccttaggcaggacttctcttctgagctggtagaagcagtgtgatccagggattactggcctccagagtcttcaagatcctgagaacttggaattccttgtaactggagctcggagctgcaccgagggcaaccaggacagctgtgtgtgcagacctcatgtgttgggttctctcccctccttcctgttcctcttatataccagtttatccccattctttttttttttcttactccaaaataaatcaaggctgcaatgcagctggtgctgttcagattctaccatcaggtgctataagtgtttgggattgagcatcatactggaaagcaaacacctttcctccagctccagaattccttgtctctgaatgactctgtcttgtgggtgtctgacagtggcgacgatgaacatgccgttggttttattggcagtgggcacaaggaggtgagaagtggtggtaaaagaagcagagtgctgaagcagagagcagatttaatatagtaacattaacagtgtatttaattgacatttcttttttgtaaacctgacgagatgtggacaaagaagaagatgcaggtttaagaagttaatatttataaaatgtgaaagacacagttactaggataacttttttgtgggtggggcttgggagatggggtggggtgggttaaggggtcccattttgtttctttggatttggggtgggggtcctggccaagaactcagtcatttttctgtgtaccaggttgcctaaatcatgtgcagatggttctaaaaaaaaaaaaaaaaaaaaaaaaaaaaggaaaaaaaaaaagaaaaagaaaacgtgtgcattttgtataatggccagaactttgtcgtgtgacagtattagcactgcctcagttaaaggtttaatttttgtttaaacctagacgtgcaacaaaagttttaccacagtctgcacttgcagaagaaagaaaaaaattcaaaccacatgtttattttttttttgcctacctcattgttcttaatgcattgagaggtgatttagtttatatgtttttggaagaaaccattaatgtttaatttaatcttaataccaaaacgaccagattgaagtttgacttttattgtcacaaatcagcaggcacaagaactgtccatgaagatgggaaatagccttaaggctgatgcagtttacttacaagtttagaaaccagaatgctttgtttttaccagattcaccattagaggttgatggggcaactgcagcccatgacacaagatctcattgttctcgatgtagaggggttggtagcagacaggtggttacattagaatagtcacacaaactgttcagtgttgcaggaaccttttcttgggggtgggggagtttcccttttctaaaaatgcaatgcactaaaactattttaagaatgtagttaattctgcttattcataaagtgggcatcttctgtgttttaggtgtaatatcgaagtcctggcttttctcgttttctcacttgctctcttgttctctgtttttttaaaccaattttactttatgaatatattcatgacatttgtaataaatgtcttgagaaagaatttgtttcatggcttcatggtcatcactcaagctcccgtaaggatattaccgtctcaggaaaggatcaggactccatgtcacagtcctgccatcttactttcctcttgtcgagttctgagtggaaataactgcattatggctgctttaacctcagtcatcaaaagaaacttgctgttttttaggcttgatctttttcctttgtggttaattttcctgtatattgtgaaaatgggggattttccctctgctcccacccacctaaacacagcagccatttgtacctgtttgcttcccatcccacttggcacccactctgacctcttgtcagtttcctgttcctggttccatctttttgaaaaaggccctcctttgagctacaaacatctggtaagacaagtacatccactcatgaatgcagacacagcagctggtggttttgtgtatacctgtaaagacaagctgagaagcttactttttggggaagtaaaagaagatggaaatggatgtttcatttgtatgagtttggagcagtgctgaaggccaaagccgcctactggtttgtagttaacctagagaaggttgaaaaattaatcctacctttaaagggatttgaggtaggctggattccatcgccacaggactttagttagaattaaattcctgcttgtaatttatatccatgtttaggcttttcataagatgaaacatgccacagtgaacacactcgtgtacatatcaagagaagaaggaaaggcacaggtggagaacagtaaaaggtgggcagatgtctttgaagaaatgctcaatgtctgatgctaagtgggagaaggcagagaacaaaggatgtggcataatggtcttaacattatccaaagacttgaagctccatgtctgtaagtcaaatgttacacaaaaaaaaatgcaaatggtgtttcattggaattaccaagtgcttagaacttgctggctttcccataggtggtaaaggggtctgagctcacaccgagttgtgcttggcttgcttgtgcagctccaggcacccggtgggcactctggtggtgtttgtggtgaactgaattgaatccattgttgggcttaagttactgaaattggaacaccctttgtccttctcggcgggggcttcctggtctgtgctttacttggcttttttccttcccgtcttagcctcacccccttgtcaaccagattgagttgctatagcttgatgcagggacccagtgaagtttctccgttaaagattgggagtcgtcgaaatgtttagattcttttaggaaaggaattattttccccccttttacagggtagtaacttctccacagaagtgccaatatggcaaaattacacaagaaaacagtattgcaatgacaccattacataaggaacattgaactgttagaggagtgctcttccaaacaaaacaaaaatgtctctaggtttagtcagagctttcacaagtaataacctttctgtattaaaatcagagtaaccctttctgtattgagtgcagtgttttttactcttttctcatgcacatgttacgttggagaaaatgtttacaaaaatggttttgttacactaatgcgcaccacatatttatggtttattttaagtgactttttatgggttatttaggttttcgtcttagttgtagcacacttaccctaattttgccaattattaatttgctaaatagtaatacaaatgacaaactgcattaaatttactaattataaaagctgcaaagcagactggtggcaagtacacagcccttttttttgcagtgctaacttgtctactgtgtattatgaaaattactgttgtccccccacccttttttccttaaataaagtaaaaatgacaccta

SEQ ID NO: 67 - protein, 2055 aa, Homo sapiens
MLKFKYGARNPLDAGAAEPIASRASRLNLFFQGKPPFMTQQQMSPLSREGILDALFVLFEECSQPALMKIKHVSNFVPEVYSDTIAELQELQPSAKDFEVRSLVGCGHFAEVQVVREKATGDIYAMKVMKKKALLAQEQVSFFEEERNILSRSTSPWIPQLQYAFQDKNHLYLVMEYQPGGDLLSLLNRYEDQLDENLIQFYLAELILAVHSVHLMGYVHRDIKPENILVDRTGHIKLVDFGSAAKMNSNKMVNAKLPIGTPDYMAPEVLTVMNGDGKGTYGLDCDWWSVGVIAYEMIYGRSPFAEGTSARTFNNIMNFQRFLKFPDDPKVSSDFLDLIQSLLCGQKERLKFEGLCCHPFFSKIDWNNIRNSPPPFVPTLKSDDDTSNFDEPEKNSWVSSSPCQLSPSGFSGEELPFVGFSYSKALGILGRSESVVSGLDSPAKTSSMEKKLLIKSKELQDSQDKCHKMEQEMTRLHRRVSEVEAVLSQKEVELKASETQRSLLEQDLATYITECSSLKRSLEQARMEVSQEDDKALQLLHDIREQSRKLQEIKEQEYQAQVEEMRLMMNQLEEDLVSARRRSDLYESELRESRLAAEEFKRKATECQHKLLKAKDQGKPEVGEYAKLEKINAEQQLKIQELQEKLEKAVKASTEATELLQNIRQAKERAERELEKLQNREDSSEGIRKKLVEAEERRHSLENKVKRLETMERRENRLKDDIQTKSQQIQQMADKILELEEKHREAQVSAQHLEVHLKQKEQHYEEKIKVLDNQIKKDLADKETLENMMQRHEEEAHEKGKILSEQKAMINAMDSKIRSLEQRIVELSEANKLAANSSLFTQRNMKAQEEMISELRQQKFYLETQAGKLEAQNRKLEEQLEKISHQDHSDKNRLLELETRLREVSLEHEEQKLELKRQLTELQLSLQERESQLTALQAARAALESQLRQAKTELEETTAEAEEEIQALTAHRDEIQRKFDALRNSCTVITDLEEQLNQLTEDNAELNNQNFYLSKQLDEASGANDEIVQLRSEVDHLRREITEREMQLTSQKQTMEALKTTCTMLEEQVMDLEALNDELLEKERQWEAWRSVLGDEKSQFECRVRELQRMLDTEKQSRARADQRITESRQVVELAVKEHKAEILALQQALKEQKLKAESLSDKLNDLEKKHAMLEMNARSLQQKLETERELKQRLLEEQAKLQQQMDLQKNHIFRLTQGLQEALDRADLLKTERSDLEYQLENIQVLYSHEKVKMEGTISQQTKLIDFLQAKMDQPAKKKKVPLQYNELKLALEKEKARCAELEEALQKTRIELRSAREEAAHRKATDHPHPSTPATARQQIAMSAIVRSPEHQPSAMSLLAPPSSRRKESSTPEEFSRRLKERMHHNIPHRFNVGLNMRATKCAVCLDTVHFGRQASKCLECQVMCHPKCSTCLPATCGLPAEYATHFTEAFCRDKMNSPGLQTKEPSSSLHLEGWMKVPRNNKRGQQGWDRKYIVLEGSKVLIYDNEAREAGQRPVEEFELCLPDGDVSIHGAVGASELANTAKADVPYILKMESHPHTTCWPGRTLYLLAPSFPDKQRWVTALESVVAGGRVSREKAEADAKLLGNSLLKLEGDDRLDMNCTLPFSDQVVLVGTEEGLYALNVLKNSLTHVPGIGAVFQIYIIKDLEKLLMIAGEERALCLVDVKKVKQSLAQSHLPAQPDISPNIFEAVKGCHLFGAGKIENGLCICAAMPSKVVILRYNENLSKYCIRKEIETSEPCSCIHFTNYSILIGTNKFYEIDMKQYTLEEFLDKNDHSLAPAVFAASSNSFPVSIVQVNSAGQREEYLLCFHEFGVFVDSYGRRSRTDDLKWSRLPLAFAYREPYLFVTHFNSLEVIEIQARSSAGTPARAYLDIPNPRYLGPAISSGAIYLASSYQDKLRVICCKGNLVKESGTEHHRGPSTSRSSPNKRGPPTYNEHITKRVASSPAPPEGPSHPREPSTPHRYREGRTELRRDKSPGRPLEREKSPGRMLSTRRERSPGRLFEDSSRGRLPAGAVRTPLSQVNKVWDQSSV

SEQ ID NO: 68 - protein, 1572 aa, Homo sapiens
MERRLRALEQLARGEAGGCPGLDGLLDLLLALHHELSSGPLRRERSVAQFLSWASPFVSKVKELRLQRDDFEILKVIGRGAFGEVTVVRQRDTGQIFAMKMLHKWEMLKRAETACFREERDVLVKGDSRWVTTLHYAFQDEEYLYLVMDYYAGGDLLTLLSRFEDRLPPELAQFYLAEMVLAIHSLHQLGYVHRDVKPDNVLLDVNGHIRLADFGSCLRLNTNGMVDSSVAVGTPDYISPEILQAMEEGKGHYGPQCDWWSLGVCAYELLFGETPFYAESLVETYGKIMNHEDHLQFPPDVPDVPASAQDLIRQLLCRQEERLGRGGLDDFRNHPFFEGVDWERLASSTAPYIPELRGPMDTSNFDVDDDTLNHPGTLPPPSHGAFSGHHLPFVGFTYTSGSHSPESSSEAWAALERKLQCLEQEKVELSRKHQEALHAPTDHRELEQLRKEVQTLRDRLPEMLRDKASLSQTDGPPAGSPGQDSDLRQELDRLHRELAEGRAGLQAQEQELCRAQGQQEELLQRLQEAQEREAATASQTRALSSQLEEARAAQRELEAQVSSLSRQVTQLQGQWEQRLEESSQAKTIHTASETNGMGPPEGGPQEAQLRKEVAALREQLEQAHSHRPSGKEEALCQLQEENRRLSREQERLEAELAQEQESKQRLEGERRETESNWEAQLADILSWVNDEKVSRGYLQALATKMAEELESLRNVGTQTLPARPLKMEASARLELQSALEAEIRAKQGLQERLTQVQEAQLQAERRLQEAEKQSQALQQELAMLREELRARGPVDTKPSNSLIPFLSFRSSEKDSAKDPGISGEATRHGGEPDLRPEGRRSLRMGAVFPRAPTANTASTEGLPAKGWGMGPWEALGNGCPPPQPGSHTLRPRSFPSPTKCLRCTSLMLGLGRQGLGCDACGYFCHTTCAPQAPPCPVPPDLLRTALGVHPETGTGTAYEGFLSVPRPSGVRRGWQRVFAALSDSRLLLFDAPDLRLSPPSGALLQVLDLRDPQFSATPVLASDVIHAQSRDLPRIFRVTTSQLAVPPTTCTVLLLAESEGERERWLQVLGELQRLLLDARPRPRPVYTLKEAYDNGLPLLPHTLCAAILDQDRLALGTEEGLFVIHLRSNDIFQVGECRRVQQLTLSPSAGLLVVLCGRGPSVRLFALAELENIEVAGAKIPESRGCQVLAAGSILQARTPVLCVAVKRQVLCYQLGPGPGPWQRRIRELQAPATVQSLGLLGDRLCVGAAGGFALYPLLNEAAPLALGAGLVPEELPPSRGGLGEALGAVELSLSEFLLLFTTAGIYVDGAGRKSRGHELLWPAAPMGWGYAAPYLTVFSENSIDVFDVRRAEWVQTVPLKKVRPLNPEGSLFLYGTEKVRLTYLRNQLAEKDEFDIPDLTDNSRRQLFRTKSKRRFFFRVSEEQQKQQRREMLKDPFVRSKLISPPTNFNHLVHVGPANGRPGARDKSPSQPLRTVTQQAPEEKGRVARGSGPQRPHSFSEALRRPASMGSEGLGGDADPTGAVKRKPWTSLSSESVSCPQGSLSPATSLMQVSERPRSLPLSPELESSP

SEQ ID NO: 69 - protein, 1331 aa, Homo sapiens
MKSRRDKLHIPALTLDLSPSSQSPSLLGPSSPCSPCSPSLGLHPWSCRSGNRKSLVVGTPSPTLSRPLSPLSVPTAGSSPLDSPRNFSAASALNFPFARRADGRRWSLASLPSSGYGTNTPSSTLSSSSSSRERLHQLPFQPTPDELHFLSKHFRSSENVLDEEGGRSPRLRPRSRSLSPGRATGTFDNEIVMMNHVYRERFPKATAQMEGRLQEFLTAYAPGARLALADGVLGFIHHQIVELARDCLAKSGENLVTSRYFLEMQEKLERLLQDAHERSDSEEVSFIVQLVRKLLIIISRPARLLECLEFDPEEFYHLLEAAEGHAREGQGIKTDLPQYIIGQLGLAKDPLEEMVPLSHLEEEQPPAPESPESRALVGQSRRKPCESDFETIKLISNGAYGAVYLVRHRDTRQRFAIKKINKQNLILRNQIQQVFVERDILTFAENPFVVSMFCSFETRRHLCMVMEYVEGGDCATLLKNMGPLPVDMARLYFAETVLALEYLHNYGIVHRDLKPDNLLITSLGHIKLTDFGLSKIGLMSMATNLYEGHIEKDAREFIDKQVCGTPEYIAPEVIFRQGYGKPVDWWAMGVVLYEFLVGCVPFFGDTPEELFGQVVSDEIMWPEGDEALPADAQDLITRLLRQSPLDRLGTGGTHEVKQHPFFLALDWAGLLRHKAEFVPQLEAEDDTSYFDTRSERYRHLGSEDDETNDEESSTEIPQFSSCSHRFSKVYSSSEFLAVQPTPTFAERSFSEDREEGWERSEVDYGRRLSADIRLRSWTSSGSSCQSSSSQPERGPSPSLLNTISLDTMPKFAFSSEDEGVGPGPAGPKRPVFILGEPDPPPAATPVMPKPSSLSADTAALSHARLRSNSIGARHSTPRPLDAGRGRRLGGPRDPAPEKSRASSSGGSGGGSGGRVPKSASVSALSLIITADDGSGGPLMSPLSPRSLSSNPSSRDSSPSRDPSPVCGSLRPPIVIHSSGKKYGFSLRAIRVYMGDSDVYTVHHVVWSVEDGSPAQEAGLRAGDLITHINGESVLGLVHMDVVELLLKSGNKISLRTTALENTSIKVGPARKNVAKGRMARRSKRSRRRETQDRRKSLFKKISKQTSVLHTSRSFSSGLHHSLSSSESLPGSPTHSLSPSPTTPCRSPAPDVPADTTASPPSASPSSSSPASPAAAGHTRPSSLHGLAAKLGPPRPKTGRRKSTSSIPPSPLACPPISAPPPRSPSPLPGHPPAPARSPRLRRGQSADKLGTGERLDGEAGRRTRGPEAELVVMRRLHLSERRDSFKKQEAVQEVSFDEPQEEATGLPTSVPQIAVEGEEAVPVALGPTGRD

SEQ ID NO: 70 - protein, 1798 aa, Homo sapiens
MKRSRCRDRPQPPPPDRREDGVQRAAELSQSLPPRRRAPPGRQRLEERTGPAGPEGKEQDVVTGVSPLLFRKLSNPDIFSSTGKVKLQRQLSQDDCKLWRGNLASSLSGKQLLPLSSSVHSSVGQVTWQSSGEASNLVRMRNQSLGQSAPSLTAGLKELSLPRRGSFCRTSNRKSLIVTSSTSPTLPRPHSPLHGHTGNSPLDSPRNFSPNAPAHFSFVPARRTDGRRWSLASLPSSGYGTNTPSSTVSSSCSSQEKLHQLPFQPTADELHFLTKHFSTESVPDEEGRQSPAMRPRSRSLSPGRSPVSFDSEIIMMNHVYKERFPKATAQMEERLAEFISSNTPDSVLPLADGALSFIHHQVIEMARDCLDKSRSGLITSQYFYELQENLEKLLQDAHERSESSEVAFVMQLVKKLMIIIARPARLLECLEFDPEEFYHLLEAAEGHAKEGQGIKCDIPRYIVSQLGLTRDPLEEMAQLSSCDSPDTPETDDSIEGHGASLPSKKTPSEEDFETIKLISNGAYGAVFLVRHKSTRQRFAMKKINKQNLILRNQIQQAFVERDILTFAENPFVVSMFCSFDTKRHLCMVMEYVEGGDCATLLKNIGALPVDMVRLYFAETVLALEYLHNYGIVHRDLKPDNLLITSMGHIKLTDFGLSKIGLMSLTTNLYEGHIEKDAREFLDKQVCGTPEYIAPEVILRQGYGKPVDWWAMGIILYEFLVGCVPFFGDTPEELFGQVISDEIVWPEGDEALPPDAQDLTSKLLHQNPLERLGTGSAYEVKQHPFFTGLDWTGLLRQKAEFIPQLESEDDTSYFDTRSERYHHMDSEDEEEVSEDGCLEIRQFSSCSPRFNKVYSSMERLSLLEERRTPPPTKRSLSEEKEAHSDGLAGLKGRDRSWVIGSPEILRKRLSVSESSHTESDSSPPMTVRRRCSGLLDAPRFPEGPEEASSTLRRQPQEGIWVLTPPSGEGVSGPVTEHSGEQRPKLDEEAVGRSSGSSPAMETRGRGTSQLAEGATAKAISDLAVRRARHRLLSGDSTEKRTARPVNKVIKSASATALSLLIPSEHHTCSPLASPMSPHSQSSNPSSRDSSPSRDFLPALGSMRPPIIIHRAGKKYGFTLRAIRVYMGDSDVYTVHHMVWHVEDGGPASEAGLRQGDLITHVNGEPVHGLVHTEVVELILKSGNKVAISTTPLENTSIKVGPARKGSYKAKMARRSKRSRGKDGQESRKRSSLFRKITKQASLLHTSRSLSSLNRSLSSGESGPGSPTHSHSLSPRSPTQGYRVTPDAVHSVGGNSSQSSSPSSSVPSSPAGSGHTRPSSLHGLAPKLQRQYRSPRRKSAGSIPLSPLAHTPSPPPPTASPQRSPSPLSGHVAQAFPTKLHLSPPLGRQLSRPKSAEPPRSPLLKRVQSAEKLAAALAASEKKLATSRKHSLDLPHSELKKELPPREVSPLEVVGARSVLSGKGALPGKGVLQPAPSRALGTLRQDRAERRESLQKQEAIREVDSSEDDTEEGPENSQGAQELSLAPHPEVSQSVAPKGAGESGEEDPFPSRDPRSLGPMVPSLLTGITLGPPRMESPSGPHRRLGSPQAIEEAASSSSAGPNLGQSGATDPIPPEGCWKAQHLHTQALTALSPSTSGLTPTSSCSPPSSTSGKLSMWSWKSLIEGPDRASPSRKATMAGGLANLQDLENTTPAQPKNLSPREQGKTQPPSAPRLAHPSYEDPSQGWLWESECAQAVKEDPALSITQVPDASGDRRQDVPCRGCPLTQKSEPSLRRGQEPGGHQKHRDLALVPDELLKQT

SEQ ID NO: 71 - protein, 878 aa, Homo sapiens
MDPTAGSKKEPGGGAATEEGVNRIAVPKPPSIEEFSIVKPISRGAFGKVYLGQKGGKLYAVKVVKKADMINKNMTHQVQAERDALALSKSPFIVHLYYSLQSANNVYLVMEYLIGGDVKSLLHIYGYFDEEMAVKYISEVALALDYLHRHGIIHRDLKPDNMLISNEGHIKLTDFGLSKVTLNRDINMMDILTTPSMAKPRQDYSRTPGQVLSLISSLGFNTPIAEKNQDPANILSACLSETSQLSQGLVCPMSVDQKDTTPYSSKLLKSCLETVASNPGMPVKCLTSNLLQSRKRLATSSASSQSHTFISSVESECHSSPKWEKDCQESDEALGPTMMSWNAVEKLCAKSANAIETKGFNKKDLELALSPIHNSSALPTTGRSCVNLAKKCFSGEVSWEAVELDVNNINMDTDTSQLGFHQSNQWAVDSGGISEEHLGKRSLKRNFELVDSSPCKKIIQNKKTCVEYKHNEMTNCYTNQNTGLTVEVQDLKLSVHKSQQNDCANKENIVNSFTDKQQTPEKLPIPMIAKNLMCELDEDCEKNSKRDYLSSSFLCSDDDRASKNISMNSDSSFPGISIMESPLESQPLDSDRSIKESSFEESNIEDPLIVTPDCQEKTSPKGVENPAVQESNQKMLGPPLEVLKTLASKRNAVAFRSFNSHINASNNSEPSRMNMTSLDAMDISCAYSGSYPMAITPTQKRRSCMPHQTPNQIKSGTPYRTPKSVRRGVAPVDDGRILGTPDYLAPELLLGRAHGPAVDWWALGVCLFEFLTGIPPFNDETPQQVFQNILKRDIPWPEGEEKLSDNAQSAVEILLTIDDTKRAGMKELKRHPLFSDVDWENLQHQTMPFIPQPDDETDTSYFEARNTAQHLTVSGFSL

SEQ ID NO: 72 - protein, 683 aa, Homo sapiens
MSSGTMKFNGYLRVRIGEAVGLQPTRWSLRHSLFKKGHQLLDPYLTVSVDQVRVGQTSTKQKTNKPTYNEEFCANVTDGGHLELAVFHETPLGYDHFVANCTLQFQELLRTTGASDTFEGWVDLEPEGKVFVVITLTGSFTEATLQRDRIFKHFTRKRQRAMRRRVHQINGHKFMATYLRQPTYCSHCREFIWGVFGKQGYQCQVCTCVVHKRCHHLIVTACTCQNNINKVDSKIAEQRFGINIPHKFSIHNYKVPTFCDHCGSLLWGIMRQGLQCKICKMNVHIRCQANVAPNCGVNAVELAKTLAGMGLQPGNISPTSKLVSRSTLRRQGKESSKEGNGIGVNSSNRLGIDNFEFIRVLGKGSFGKVMLARVKETGDLYAVKVLKKDVILQDDDVECTMTEKRILSLARNHPFLTQLFCCFQTPDRLFFVMEFVNGGDLMFHIQKSRRFDEARARFYAAEIISALMFLHDKGIIYRDLKLDNVLLDHEGHCKLADFGMCKEGICNGVTTATFCGTPDYIAPEILQEMLYGPAVDWWAMGVLLYEMLCGHAPFEAENEDDLFEAILNDEVVYPTWLHEDATGILKSFMTKNPTMRLGSLTQGGEHAILRHPFFKEIDWAQLNHRQIEPPFRPRIKSREDVSNFDPDFIKEEPVLTPIDEGHLPMINQDEFRNFSYVSPELQP

SEQ ID NO: 73 - protein, 449 aa, Homo sapiens
MLMGFCRLEEAGLVSRSIRERNCLYNWDSRFSRERRQRLGMGAVSCRQGQHTQQGEHTRVAVPHKGGNIRGPWARGWKSLWTGLGTIRSDLEELWELRGHHYLHQESLKPAPVLVEKPLPEWPVPQFINLFLPEFPIRPIRGQQQLKILGLVAKGSFGTVLKVLDCTQKAVFAVKVVPKVKVLQRDTVRQCKEEVSIQRQINHPFVHSLGDSWQGKRHLFIMCSYCSTDLYSLWSAVGCFPEASIRLFAAELVLVLCYLHDLGIMHRDVKMENILLDERGHLKLTDFGLSRHVPQGAQAYTICGTLQYMAPEVLSGGPYNHAADWWSLGVLLFSLATGKFPVAAERDHVAMLASVTHSDSEIPASLNQGLSLLLHELLCQNPLHRLRYLHHFQVHPFFRGVAFDPELLQKQPVNFVTETQATQPSSAETMPFDDFDCDLESFLLYPIPA

SEQ ID NO: 74 - protein, 802 aa, Homo sapiens
MEEEGGSSGGAAGTSADGGDGGEQLLTVKHELRTANLTGHAEKVGIENFELLKVLGTGAYGKVFLVRKISGHDTGKLYAMKVLKKATIVQKAKTTEHTRTERQVLEHIRQSPFLVTLHYAFQTETKLHLILDYINGGELFTHLSQRERFTEHEVQIYVGEIVLALEHLHKLGIIYRDIKLENILLDSNGHVVLTDFGLSKEFVADETERAYSFCGTIEYMAPDIVRGGDSGHDKAVDWWSLGVLMYELLTGASPFTVDGEKNSQAEISRRILKSEPPYPQEMSALAKDLIQRLLMKDPKKRLGCGPRDADEIKEHLFFQKINWDDLAAKKVPAPFKPVIRDELDVSNFAEEFTEMDPTYSPAALPQSSEKLFQGYSFVAPSILFKRNAAVIDPLQFHMGVERPGVTNVARSAMMKDSPFYQHYDLDLKDKPLGEGSFSICRKCVHKKSNQAFAVKIISKRMEANTQKEITALKLCEGHPNIVKLHEVFHDQLHTFLVMELLNGGELFERIKKKKHFSETEASYIMRKLVSAVSHMHDVGVVHRDLKPENLLFTDENDNLEIKIIDFGFARLKPPDNQPLKTPCFTLHYAAPELLNQNGYDESCDLWSLGVILYTMLSGQVPFQSHDRSLTCTSAVEIMKKIKKGDFSFEGEAWKNVSQEAKDLIQGLLTVDPNKRLKMSGLRYNEWLQDGSQLSSNPLMTPDILGSSGAAVHTCVKATFHAFNKYKREGFCLQNVDKAPLAKRRKMKKTSTSTETRSSSSESSHSSSSHSHGKTTPTKTLQPSNPADSNNPETLFQFSDSVA

SEQ ID NO: 75 - protein, 486 aa, Homo sapiens
MRSGAERRGSSAAASPGSPPPGRARPAGSDAPSALPPPAAGQPRARDSGDVRSQPRPLFQWSKWKKRMGSSMSAATARRPVFDDKEDVNFDHFQILRAIGKGSFGKVCIVQKRDTEKMYAMKYMNKQQCIERDEVRNVFRELEILQEIEHVFLVNLWYSFQDEEDMFMVVDLLLGGDLRYHLQQNVQFSEDTVRLYICEMALALDYLRGQHIIHRDVKPDNILLDERGHAHLTDFNIATIIKDGERATALAGTKPYMAPEIFHSFVNGGTGYSFEVDWWSVGVMAYELLRGWRPYDIHSSNAVESLVQLFSTVSVQYVPTWSKEMVALLRKLLTVNPEHRLSSLQDVQAAPALAGVLWDHLSEKRVEPGFVPNKGRLHCDPTFELEEMILESRPLHKKKKRLAKNKSRDNSRDSSQSENDYLQDCLDAIQQDFVIFNREKLKRSQDLPREPLPAPESRDAAEPVEDEAERSALPMCGPICPSAGSG

SEQ ID NO: 76 - protein, 787 aa, Homo sapiens
MSSARTPLPTLNERDTEQPTLGHLDSKPSSKSNMIRGRNSATSADEQPHIGNYRLLKTIGKGNFAKVKLARHILTGKEVAVKIIDKTQLNSSSLQKLFREVRIMKVLNHPNIVKLFEVIETEKTLYLVMEYASGGEVFDYLVAHGRMKEKEARAKFRQIVSAVQYCHQKFIVHRDLKAENLLLDADMNIKIADFGFSNEFTFGNKLDTFCGSPPYAAPELFQGKKYDGPEVDVWSLGVILYTLVSGSLPFDGQNLKELRERVLRGKYRIPFYMSTDCENLLKKFLILNPSKRGTLEQIMKDRWMNVGHEDDELKPYVEPLPDYKDPRRTELMVSMGYTREEIQDSLVGQRYNEVMATYLLLGYKSSELEGDTITLKPRPSADLTNSSAQFPSHKVQRSVSANPKQRRFSDQAGPAIPTSNSYSKKTQSNNAENKRPEEDRESGRKASSTAKVPASPLPGLERKKTTPTPSTNSVLSTSTNRSRNSPLLERASLGQASIQNGKDSLTMPGSRASTASASAAVSAARPRQHQKSMSASVHPNKASGLPPTESNCEVPRPSTAPQRVPVASPSAHNISSSGGAPDRTNFPRGVSSRSTFHAGQLRQVRDQQNLPYGVTPASPSGHSQGRRGASGSIFSKFTSKFVRRNLSFRFARRNLNEPESKDRVETLRPHVVGSGGNDKEKEEFREAKPRSLRFTWSMKTTSSMEPNEMMREIRKVLDANSCQSELHEKYMLLCMHGTPGHEDFVQWEMEVCKLPRLSLNGVRFKRISGTSMAFKNIASKIANELKL

SEQ ID NO: 77 - protein, 672 aa, Homo sapiens
MLCFTARSGTAVAPRPGAGPVPRASALPAQPIDSPAALAHLLLAMESLVFARRSGPTPSAAELARPLAEGLIKSPKPLMKKQAVKRHHHKHNLRHRYEFLETLGKGTYGKVKKARESSGRLVAIKSIRKDKIKDEQDLMHIRREIEIMSSLNHPHIIAIHEVFENSSKIVIVMEYASRGDLYDYISERQQLSEREARHFFRQIVSAVHYCHQNRVVHRDLKLENILLDANGNIKIADFGLSNLYHQGKFLQTFCGSPLYASPEIVNGKPYTGPEVDSWSLGVLLYILVHGTMPFDGHDHKILVKQISNGAYREPPKPSDACGLIRWLLMVNPTRRATLEDVASHWWVNWGYATRVGEQEAPHEGGHPGSDSARASMADWLRRSSRPLLENGAKVCSFFKQHAPGGGSTTPGLERQHSLKKSRKENDMAQSLHSDTADDTAHRPGKSNLKLPKGILKKKVSASAEGVQEDPPELSPIPASPGQAAPLLPKKGILKKPRQRESGYYSSPEPSESGELLDAGDVFVSGDPKEQKPPQASGLLLHRKGILKLNGKFSQTALELAAPTTFGSLDELAPPRPLARASRPSGAVSEDSILSSESFDQLDLPERLPEPPLRGCVSVDNLTGLEEPPSEGPGSCLRRWRQDPLGDSCFSLTDCQEVTATYRQALRVCSKLT

SEQ ID NO: 78 - protein, 674 aa, Homo sapiens
MTSTGKDGGAQHAQYVGPYRLEKTLGKGQTGLVKLGVHCVTCQKVAIKIVNREKLSESVLMKVEREIAILKLIEHPHVLKLHDVYENKKYLYLVLEHVSGGELFDYLVKKGRLTPKEARKFFRQIISALDFCHSHSICHRDLKPENLLLDEKNNIRIADFGMASLQVGDSLLETSCGSPHYACPEVIRGEKYDGRKADVWSCGVILFALLVGALPFDDDNLRQLLEKVKRGVFHMPHFIPPDCQSLLRGMIEVDAARRLTLEHIQKHIWYIGGKNEPEPEQPIPRKVQIRSLPSLEDIDPDVLDSMHSLGCFRDRNKLLQDLLSEEENQEKMIYFLLLDRKERYPSQEDEDLPPRNEIDPPRKRVDSPMLNRHGKRRPERKSMEVLSVTDGGSPVPARRAIEMAQHGQRSRSISGASSGLSTSPLSSPRVTPHPSPRGSPLPTPKGTPVHTPKESPAGTPNPTPPSSPSVGGVPWRARLNSIKNSFLGSPRFHRRKLQVPTPEEMSNLTPESSPELAKKSWFGNFISLEKEEQIFVVIKDKPLSSIKADIVHAFLSIPSLSHSVISQTSFRAEYKATGGPAVFQKPVKFQVDITYTEGGEAQKENGIYSVTFTLLSGPSRRFKRVVETIQAQLLSTHDPPAAQHLSEPPPPAPGLSWGAGLKGQKVATSYESSL

SEQ ID NO: 79 - protein, 752 aa, Homo sapiens
MSSRTVLAPGNDRNSDTHGTLGSGRSSDKGPSWSSRSLGARCRNSIASCPEEQPHVGNYRLLRTIGKGNFAKVKLARHILTGREVAIKIIDKTQLNPSSLQKLFREVRIMKGLNHPNIVKLFEVIETEKTLYLVMEYASAGEVFDYLVSHGRMKEKEARAKFRQIVSAVHYCHQKNIVHRDLQAENLLLDAEANIKIADFGFSNEFTLGSKLDTFCGSPPYAAPELFQGKKYDGPEVDIWSLGVILYTLVSGSLPFDGHNLKELRERVLRGKYRVPFYMSTDCESILRRFLVLNPAKRCTLEQIMKDKWINIGYEGEELKPYTEPEEDFGDTKRIEVMVGMGYTREEIKESLTSQKYNEVTATYLLLGRKTEEGGDRGAPGLALARVRAPSDTTNGTSSSKGTSHSKGQRSSSSTYHRQRRHSDFCGPSPAPLHPKRSPTSTGEAELKEERLPGRKASCSTAGSGSRGLPPSSPMVSSAHNPNKAEIPERRKDSTSTPNNLPPSMMTRRNTYVCTERPGAERPSLLPNGKENSSGTPRVPPASPSSHSLAPPSGERSRLARGSTIRSTFHGGQVRDRRAGGGGGGGVQNGPPASPTLAHEAAPLPAGRPRPTTNLFTKLTSKLTRRVADEPERIGGPEVTSCHLPWDQTETAPRLLRFPWSVKLTSSRPPEALMAALRQATAAARCRCRQPQPFLLACLHGGAGGPEPLSHFEVEVCQLPRPGLRGVLFRRVAGTALAFRTLVTRISNDLEL

SEQ ID NO: 80 - protein, 766 aa, Homo sapiens
MASTRSIELEHFEERDKRPRPGSRRGAPSSSGGSSSSGPKGNGLIPSPAHSAHCSFYRTRTLQALSSEKKAKKARFYRNGDRYFKGLVFAISSDRFRSFDALLIELTRSLSDNVNLPQGVRTIYTIDGSRKVTSLDELLEGESYVCASNEPFRKVDYTKNINPNWSVNIKGGTSRALAAASSVKSEVKESKDFIKPKLVTVIRSGVKPRKAVRILLNKKTAHSFEQVLTDITEAIKLDSGVVKRLCTLDGKQVTCLQDFFGDDDVFIACGPEKFRYAQDDFVLDHSECRVLKSSYSRSSAVKYSGSKSPGPSRRSKSPASVNGTPSSQLSTPKSTKSSSSSPTSPGSFRGLKQISAHGRSSSNVNGGPELDRCISPEGVNGNRCSESSTLLEKYKIGKVIGDGNFAVVKECIDRSTGKEFALKIIDKAKCCGKEHLIENEVSILRRVKHPNIIMLVEEMETATELFLVMELVKGGDLFDAITSSTKYTERDGSAMVYNLANALRYLHGLSIVHRDIKPENLLVCEYPDGTKSLKLGDFGLATVVEGPLYTVCGTPTYVAPEIIAETGYGLKVDIWAAGVITYILLCGFPPFRSENNLQEDLFDQILAGKLEFPAPYWDNITDSAKELISQMLQVNVEARCTAGQILSHPWVSDDASQENNMQAEVTGKLKQHFNNALPKQNSTTTGVSVIMNTALDKEGQIFCSKHCQDSGRPGMEPISPVPPSVEEIPVPGEAVPAPTPPESPTPHCPPAAPGGERAGTWRRHRD

SEQ ID NO: 81 - protein, 434 aa, Homo sapiens
LAPIGCGTAGAASGLIKARWAGLSPRVTLPGGACPGSVALGLARAANLNAAPSAGASGPPVSLLSTLAPPSPGSPAALPRASTPCGLSGFSGLNLRSATSMLTKPLQGPPAPPGTPTPPPGGKDREAFEAEYRLGPLLGKGGFGTVFAGHRLTDRLQVAIKVIPRNRVLGWSPLSDSVTCPLEVALLWKVGAGGGHPGVIRLLDWFETQEGFMLVLERPLPAQDLFDYITEKGPLGEGPSRCFFGQVVAAIQHCHSRGVVHRDIKDENILIDLRRGCAKLIDFGSGALLHDEPYTDFDGTRVYSPPEWISRHQYHALPATVWSLGILLYDMVCGDIPFERDQEILEAELHFPAHVSPDCCALIRRCLAPKPSSRPSLEEILLDPWMQTPAEDVTPQPLQRRPCPFGLVLATLSLAWPGLAPNGQKSHPMAMSQG

SEQ ID NO: 82 - protein, 326 aa, Homo sapiens
MLLSKFGSLAHLCGPGGVDHLPVKILQPAKADKESFEKAYQVGAVLGSGGFGTVYAGSRIADGLPVAVKHVVKERVTEWGSLGGATVPLEVVLLRKVGAAGGARGVIRLLDWFERPDGFLLVLERPEPAQDLFDFITERGALDEPLARRFFAQVLAAVRHCHSCGVVHRDIKDENLLVDLRSGELKLIDFGSGALLKDTVYTDFDGTRVYSPPEWIRYHRYHGRSATVWSLGVLLYDMVCGDIPFEQDEEILRGRLLFRRRVSPECQQLIRWCLSLRPSERPSLDQIAAHPWMLGADGGAPESCDLRLCTLDPDDVASTTSSSESL

SEQ ID NO: 83 - protein, 328 aa, Homo sapiens
MGKGDVLEAAPTTTAYHSLMDEYGYEVGKAIGHGSYGSVYEAFYTKQKVMVAVKIISKKKASDDYLNKFLPREIQVMKVLRHKYLINFYRAIESTSRVYIILELAQGGDVLEWIQRYGACSEPLAGKWFSQLTLGIAYLHSKSIVHRDLKLENLLLDKWENVKISDFGFAKMVPSNQPVGCSPSYRQVNCFSHLSQTYCGSFAYACPEILRGLPYNPFLSDTWSMGVILYTLVVAHLPFDDTNLKKLLRETQKEVTFPANHTISQECKNLILQMLRQATKRATILDIIKDSWVLKFQPEQPTHEIRLLEAMCQLHNTTKQHQSLQITT

SEQ ID NO: 84 - protein, 1244 aa, Homo sapiens
MSGGGEQLDILSVGILVKERWKVLRKIGGGGFGEIYDALDMLTRENVALKVESAQQPKQVLKMEVAVLKKLQGKDHVCRFIGCGRNDRFNYVVMQLQGRNLADLRRSQSRGTFTISTTLRLGRQILESIESIHSVGFLHRDIKPSNFAMGRFPSTCRKCYMLDFGLARQFTNSCGDVRPPRAVAGFRGTVRYASINAHRNREMGRHDDLWSLFYMLVEFVVGQLPWRKIKDKEQVGSIKERYDHRLMLKHLPPEFSIFLDHISSLDYFTKPDYQLLTSVFDNSIKTFGVIESDPFDWEKTGNDGSLTTTTTSTTPQLHTRLTPAAIGIANATPIPGDLLRENTDEVFPDEQLSDGENGIPVGVSPDKLPGSLGHPRPQEKDVWEEMDANKNKIKLGICKAATEEENSHGQANGLLNAPSLGSPIRVRSEITQPDRDIPLVRKLRSIHSFELEKRLTLEPKPDTDKFLETCLEKMQKDTSAGKESILPALLHKPCVPAVSRTDHIWHYDEEYLPDASKPASANTPEQADGGGSNGFIAVNLSSCKQEIDSKEWVIVDKEQDLQDFRTNEAVGHKTTGSPSDEEPEVLQVLEASPQDEKLQLGPWAENDHLKKETSGVVLALSAEGPPTAASEQYTDRLELQPGAASQFIAATPTSLMEAQAEGPLTAITIPRPSVASTQSTSGSFHCGQQPEKKDLQPMEPTVELYSPRENFSGLVVTEGEPPSGGSRTDLGLQIDHIGHDMLPNIRESNKSQDLGPKELPDHNRLVVREFENLPGETEEKSILLESDNEDEKLSRGQHCIEISSLPGDLVIVEKDHSATTEPLDVTKTQTFSVVPNQDKNNEIMKLLTVGTSEISSRDIDPHVEGQIGQVAEMQKNKISKDDDIMSEDLPGHQGDLSTFLHQEGKREKITPRNGELFHCVSENEHGAPTRKDMVRSSFVTRHSRIPVLAQEIDSTLESSSPVSAKEKLLQKKAYQPDLVKLLVEKRQFKSFLGDLSSASDKLLEEKLATVPAPFCEEEVLTPFSRLTVDSHLSRSAEDSFLSPIISQSRKSKIPRPVSWVNTDQVNSSTSSQFFPRPPPGKPPTRPGVEARLRRYKVLGSSNSDSDLFSRLAQILQNGSQKPRSTTQCKSPGSPHNPKTPPKSPVVPRRSPSASPRSSSLPRTSSSSPSRAGRPHHDQRSSSPHLGRSKSPPSHSGSSSSRRSCQQEHCKPSKNGLKGSGSLHHHSASTKTPQGKSKPASKLSR

SEQ ID NO: 85 - protein, 504 aa, Homo sapiens
MIMNKMKNFKRRFSLSVPRTETIEESLAEFTEQFNQLHNRRNENLQLGPLGRDPPQECSTFSPTDSGEEPGQLSPGVQFQRRQNQRRFSMEVRASGALPRQVAGCTHKGVHRRAAALQPDFDVSKRLSLPMDIRLPQEFLQKLQMESPDLPKPLSRMSRRASLSDIGFGKLETYVKLDKLGEGTYATVFKGRSKLTENLVALKEIRLEHEEGAPCTAIREVSLLKNLKHANIVTLHDLIHTDRSLTLVFEYLDSDLKQYLDHCGNLMSMHNVKIFMFQLLRGLAYCHHRKILHRDLKPQNLLINERGELKLADFGLARAKSVPTKTYSNEVVTLWYRPPDVLLGSTEYSTPIDMWGVGCIHYEMATGRPLFPGSTVKEELHLIFRLLGTPTEETWPGVTAFSEFRTYSFPCYLPQPLINHAPRLDTDGIHLLSSLLLYESKSRMSAEAALSHSYFRSLGERVHQLEDTASIFSLKEIQLQKDPGYRGLAFQQPGRGKNRRQSIF

SEQ ID NO: 86 - protein, 435 aa, Homo sapiens
MGQELCAKTVQPGCSCYHCSEGGEAHSCRRSQPETTEAAFKLTDLKEASCSMTSFHPRGLQAARAQKFKSKRPRSNSDCFQEEDLRQGFQWRKSLPFGAASSYLNLEKLGEGSYATVYKGISRINGQLVALKVISMNAEEGVPFTAIREASLLKGLKHANIVLLHDIIHTKETLTFVFEYMHTDLAQYMSQHPGGLHPHNVRLFMFQLLRGLAYIHHQHVLHRDLKPQNLLISHLGELKLADFGLARAKSIPSQTYSSEVVTLWYRPPDALLGATEYSSELDIWGAGCIFIEMFQGQPLFPGVSNILEQLEKIWEVLGVPTEDTWPGVSKLPNYNPEWFPLPTPRSLHVVWNRLGRVPEAEDLASQMLKGFPRDRVSAQEALVHDYFSALPSQLYQLPDEESLFTVSGVRLKPEMCDLLASYQKGHHPAQFSKCW

SEQ ID NO: 87 - protein, 563 aa, Homo sapiens
MCTVVDPRIVRRYLLRRQLGQGAYGIVWKAVDRRTGEVVAIKKIFDAFRDKTDAQDMGFLLAPPTHTPVFLSLQRTFREITLLQEFGDHPNIISLLDVIRAENDRDIYLVFEFMDTDLNAVIRKGGLLQDVHVRSIFYQLLRATRFLHSGHVVHRDQKPSNVLLDANCTVKLCDFGLARSLGDLPEGPEDQAVTEYVATRWYRAPEVLLSSHRYTLGVDMWSLGCILGEMLRGRPLFPGTSTLHQLELILETIPPPSEEDLLALGSGCRASVLHQLGSRPRQTLDALLPPDTSPEALDLLRRLLVFAPDKRLSATQALQHPYVQRFHCPSDEWAREADVRPRAHEGVQLSVPEYRSRVYQMILECGGSSGTSREKGPEGVSPSQAHLHKPRADPQLPSRTPVQGPRPRPQSSPGHDPAEHESPRAAKNVPRQNSAPLLQTALLGNGERPPGAKEAPPLTLSLVKPSGRGAAPSLTSQAAAQVANQALIRGDWNRGGGVRVASVQQVPPRLPPEARPGRRMFSTSALQGAQGGARALLGGYSQAYGTVCHSALGHLPLLEGHHV

SEQ ID NO: 88 - protein, 391 aa, Homo sapiens [sequence omitted]

SEQ ID NO: 89 - protein, 921 aa, Homo sapiens
MNTPLQSAHTHLTLVEFIAYLVSDSPFPAASTLSLPTCNFDPCPTKLGAGTMPPAAAGGQRRPHAAPPAAYPHRNKVRAAEARTSRAVRREYEAGDEASGRRGRGGRMKSVQNARADRGMWVRERRAVVRGQENTVVVFAAAASPESDFLQIVLRDIAREMVPEYKSDLQPRTQMDAKKPRKCDLTPFLVLKARKKQKFTSAKHLWVQRKGKGVEDHADWQGQIWVGVEGKSAEGQGLNLTGAFNRSPENKVSPQGPALNALEIDSSYLDPQALALPQGWQGLLFPPLLGTELVGSKLSVQIQKPPSNIKNSRMTQVFHKNTSVTSLPFVDTKGKKNTVSFPHISKKVLLKSSLLYQVSADGLDPEKAGERPGFSPKPVLERPRIVGKSTVAAEEENQAHNQMPASELKASEIPFHPSIKTQDPKAEEKSPKKQKVTLTAAEALKLFKNQLSPYEQSEILGYAELWFLGLEAKKLDTAPEKFSKTSFDDEHGFYLKVLHDHIAYRYEVLETIGKGSFGQVAKCLDHKNNELVALKIIRNKKRFHQQALMELKILEALRKKDKDNTYNVVHMKDFFYFRNHFCITFELLGINLYELMKNNNFQGFSLSIVRRFTLSVLKCLQMLSVEKIIHCDLKPENIVLYQKGQASVKVIDFGSSCYEHQKVYTYIQSRFYRSPEVILGHPYDVAIDMWSLGCITAELYTGYPLFPGENEVEQLACIMEVLGLPPAGFIQTASRRQTFFDSKGFPKNITNNRGKKRYPDSKDLTMVLKTYDTSFLDFLRRCLVWEPSLRMTPDQALKHAWIHQSRNLKPQPRPQTLRKSNSFFPSETRKDKVQGCHHSSRKDEITKETTEKTKDSPTKHVQHSGDQQDCLQHGADTVQLPQLVDAPKKSEAAVGAEVSMTSPGQSKNFSLKNTNVLPPIV

SEQ ID NO: 90 - protein, 1210 aa, Homo sapiens
MASQLQVFSPPSVSSSAFCSAKKLKIEPSGWDVSGQSSNDKYYTHSKTLPATQGQANSSHQVANFNIPAYDQGLLLPAPAVEHIVVTAADSSGSAATSTFQSSQTLTHRSNVSLLEPYQKCGLKRKSEEVDSNGSVQIIEEHPPLMLQNRTVVGAAATTTTVTTKSSSSSGEGDYQLVQHEILCSMTNSYEVLEFLGRGTFGQVAKCWKRSTKEIVAIKILKNHPSYARQGQIEVSILSRLSSENADEYNLVRSYECFQHKNHTCLVFEMLEQNLYDFLKQNKFSPLPLKYIRPILQQVATALMKLKSLGLIHADLKPENIMLVDPVRQPYRVKVIDFGSASHVSKAVCSTYLQSRYYRAPEIILGLPFCEAIDMWSLGCVIAELFLGWPLYPGASEYDQIRYISQTQGLPAEYLLSAGTKTTRFFNRDPNLGYPLWRLKTPEEHELETGIKSKEARKYIFNCLDDMAQVNMSTDLEGTDMLAEKADRREYIDLLKKMLTIDADKRITPLKTLNHQFVTMTHLLDFPHSNHVKSCFQNMEICKRRVHMYDTVSQIKSPFTTHVAPNTSTNLTMSFSNQLNTVHNQASVLASSSTAAAATLSLANSDVSLLNYQSALYPSSAAPVPGVAQQGVSLQPGTTQICTQTDPFQQTFIVCPPAFQTGLQATTKHSGFPVRMDNAVPIVPQAPAAQPLQIQSGVLTQGSCTPLMVATLHPQVATITPQYAVPFTLSCAAGRPALVEQTAAVLQAWPGGTQQILLPSTWQQLPGVALHNSVQPTAMIPEAMGSGQQLADWRNAHSHGNQYSTIMQQPSLLTNHVTLATAQPLNVGVAHVVRQQQSSSLPSKKNKQSAPVSSKSSLDVLPSQVYSLVGSSPLRTTSSYNSLVPVQDQHQPIIIPDTPSPPVSVITIRSDTDEEEDNKYKPSSSGLKPRSNVISYVTVNDSPDSDSSLSSPYSTDTLSALRGNSGSVLEGPGRVVADGTGTRTIIVPPLKTQLGDCTVATQASGLLSNKTKPVASVSGQSSGCCITPTGYRAQRGGTSAAQPLNLSQNQQSSAAPTSQERSSNPAPRRQQAFVAPLSQAPYTFQHGSPLHSTGHPHLAPAPAHLPSQAHLYTYAAPTSAAALGSTSSIAHLFSPQGSSRHAAAYTTHPSTLVHQVPVSVGPSLLTSASVAPAQYQHQFATQSYIGSSRGSTIYTGYPLSPTKISQYSYL

SEQ ID NO: 91 - protein, 616 aa, Homo sapiens
MSTIQSETDCYDIIEVLGKGTFGEVAKGWRRSTGEMVAIKILKNDAYRNRIIKNELKLLHCMRGLDPEEAHVIRFLEFFHDALKFYLVFELLEQNLFEFQKENNFAPLPARHIRTVTLQVLTALARLKELAIIHADLKPENIMLVDQTRCPFRVKVIDFGSASIFSEVRYVKEPYIQSRFYRAPEILLGLPFCEKVDVWSLGCVMAELHLGWPLYPGNNEYDQVRYICETQGLPKPHLLHAACKAHHFFKRNPHPDAANPWQLKSSADYLAETKVRPLERRKYMLKSLDQIETVNGGSVASRLTFPDREALAEHADLKSMVELIKRMLTWESHERISPSAALRHPFVSMQQLRSAHETTHYYQLSLRSYRLSLQVEGKPPTPVVAAEDGTPYYCLAEEKEAAGMGSVAGSSPFFREEKAPGMQRAIDQLDDLSLQEAGHGLWGETCTNAVSDMMVPLKAAITGHHVPDSGPEPILAFYSSRLAGRHKARKPPAGSKSDSNFSNLIRLSQVSPEDDRPCRGSSWEEGEHLGASAEPLAILQRDEDGPNIDNMTMEAERPDPELFDPSSCPGEWLSEPDCTLESVRGPRAQGLPPRRSHQHGPPRGATSFLQHVTGHH

SEQ ID NO: 92 - protein, 1161 aa, Homo sapiens
MKKFSRMPKSEGGSGGGAAGGGAGGAGAGAGCGSGGSSVGVRVFAVGRHQVTLEESLAEGGFSTVFLVRTHGGIRCALKRMYVNNMPDLNVCKREITIMKELSGHKNIVGYLDCAVNSISDNVWEVLILMEYCRAGQVVNQMNKKLQTGFTEPEVLQIFCDTCEAVARLHQCKTPIIHRDLKVENILLNDGGNYVLCDFGSATNKFLNPQKDGVNVVEEEIKKYTTLSYRAPEMINLYGGKPITTKADIWALGCLLYKLCFFTLPFGESQVAICDGNFTIPDNSRYSRNIHCLIRFMLEPDPEHRPDIFQVSYFAFKFAKKDCPVSNINNSSIPSALPEPMTASEAAARKSQIKARITDTIGPTETSIAPRQRPKANSATTATPSVLTIQSSATPVKVLAPGEFGNHRPKGALRPGNGPEILLGQGPPQQPPQQHRVLQQLQQGDWRLQQLHLQHRHPHQQQQQQQQQQQQQQQQQQQQQQQQQQQHHHHHHHHLLQDAYMQQYQHATQQQQMLQQQFLMHSVYQPQPSASQYPTMMPQYQQAFFQQQMLAQHQPSQQQASPEYLTSPQEFSPALVSYTSSLPAQVGTIMDSSYSANRSVADKEAIANFTNQKNISNPPDMSGWNPFGEDNFSKLTEEELLDREFDLLRSNRLEERASSDKNVDSLSAPHNHPPEDPFGSVPFISHSGSPEKKAEHSSINQENGTANPIKNGKTSPASKDQRTGKKTSVQGQVQKGNDESESDFESDPPSPKSSEEEEQDDEEVLQGEQGDFNDDDTEPENLGHRPLLMDSEDEEEEEKHSSDSDYEQAKAKYSDMSSVYRDRSGSGPTQDLNTILLTSAQLSSDVAVETPKQEFDVFGAVPFFAVRAQQPQQEKNEKNLPQHRFPAAGLEQEEFDVFTKAPFSKKVNVQECHAVGPEAHTIPGYPKSVDVFGSTPFQPFLTSTSKSESNEDLFGLVPFDEITGSQQQKVKQRSLQKLSSRQRRTKQDMSKSNGKRHHGTPTSTKKTLKPTYRTPERARRHKKVGRRDSQSSNEFLTISDSKENISVALTDGKDRGNVLQPEESLLDPFGAKPFHSPDLSWHPPHQGLSDIRADHNTVLPGRPRQNSLHGSFHSADVLKMDDFGAVPFTELVVQSITPHQSQQSQPVELDPFGAAPFPSKQ

SEQ ID NO: 93 - protein, 1125 aa, Homo sapiens
MPDQDKKVKTTEKSTDKQQEITIRDYSDLKRLRCLLNVQSSKQQLPAINFDSAQNSMTKSEPAIRAGGHRARGQWHESTEAVELENFSINYKNERNFSKHPQRKLFQEIFTALVKNRLISREWVNRAPSIHFLRVLICLRLLMRDPCYQEILHSLGGIENLAQYMEIVANEYLGYGEEQHTVDKLVNMTYIFQKLAAVKDQREWVTTSGAHKTLVNLLGARDTNVLLGSLLALASLAESQECREKISELNIVENLLMILHEYDLLSKRLTAELLRLLCAEPQVKEQVKLYEGIPVLLSLLHSDHLKLLWSIVWILVQVCEDPETSVEIRIWGGIKQLLHILQGDRNFVSDHSSIGSLSSANAAGRIQQLHLSEDLSPREIQENTFSLQAACCAALTELVLNDTNAHQVVQENGVYTIAKLILPNKQKNAAKSNLLQCYAFRALRFLFSMERNRPLFKRLFPTDLFEIFIDIGHYVRDISAYEELVSKLNLLVEDELKQIAENIESINQNKAPLKYIGNYAILDHLGSGAFGCVYKVRKHSGQNLLAMKEVNLHNPAFGKDKKDRDSSVRNIVSELTIIKEQLYHPNIVRYYKTFLENDRLYIVMELIEGAPLGEHFSSLKEKHHHFTEERLWKIFIQLCLALRYLHKEKRIVHRDLTPNNIMLGDKDKVTVTDFGLAKQKQENSKLTSVVGTILYSCPEVLKSEPYGEKADVWAVGCILYQMATLSPPFYSTNMLSLATKIVEAVYEPVPEGIYSEKVTDTISRCLTPDAEARPDIVEVSSMISDVMMKYLDNLSTSQLSLEKKLERERRRTQRYFMEANRNTVTCHHELAVLSHETFEKASLSSSSSGAASLKSELSESADLPPEGFQASYGKDEDRACDEILSDDNFNLENAEKDTYSEVDDELDISDNSSSSSSSPLKESTFNILKRSFSASGGERQSQTRDFTGGTGSRPRPGPQMGTFLWQASAGIAVSQRKVRQISDPIQQILIQLHKIIYITQLPPALHHNLKRRVIERFKKSLFSQQSNPCNLKSEIKKLSQGSPEPIEPNFFTADYHLLHRSSGGNSLSPNDPTGLPTSIELEEGITYEQMQTVIEEVLEESGYYNFTSNRYHSYPWGTKNHPTKR

SEQ ID NO: 94 - protein, 889 aa, Homo sapiens
MQIVGSPGPGAAWPVKRVVFPNGEQFLLSVATKKVICLCLGKAGRKVLAKKLSPLETMDKYDVIKAIGQGAFGKAYLAKGKSDSKHCVIKEINFEKMPIQEKEASKKEVILLEKMKHPNIVAFFNSFQENGRLFIVMEYCDGGDLMKRINRQRGVLFSEDQILGWFVQISLGLKHIHDRKILHRDIKAQNIFLSKNGMVAKLGDFGIARVLNNSMELARTCIGTPYYLSPEICQNKPYNNKTDIWSLGCVLYELCTLKHPFEGNNLQQLVLKICQAHFAPISPGFSRELHSLISQLFQVSPRDRPSINSILKRPFLENLIPKYLTPEVIQEEFSHMLICRAGAPASRHAGKVVQKCKIQKVRFQGKCPPRSRISVPIKRNAILHRNEWRPPAGAQKARSIKMIERPKIAAVCGHYDYYYAQLDMLRRRAHKPSYHPIPQENTGVEDYGQETRHGPSPSQWPAEYLQRKFEAQQYKLKVEKQLGLRPSSAEPNYNQRQELRSNGEEPRFQELPFRKNEMKEQEYWKQLEEIRQQYHNDMKEIRKKMGREPEENSKISHKTYLVKKSNLPVHQDASEGEAPVQDIEKDLKQMRLQNTKESKNPEQKYKAKKGVKFEINLDKCISDENILQEEEAMDIPNETLTFEDGMKFKEYECVKEHGDYTDKAFEKLHCPEAGFSTQTVAAVGNRRQWDGGAPQTLLQMMAVADITSTCPTGPDNGQVIVIEGIPGNRKQWRHEAPGTLMSVLAAAHLTSSSFSADEEFAMGTLKQWLPKEEDEGKVEMVSGIEVDEEQLEPRSDDDDTNFEESEDELRDEVVEYLEKLATFKGEEKTEEASSTSKDSRKSREREGISMQKSEELREGLENISTTSNDHICITDEDQGTSTTSQNIQV

SEQ ID NO: 95 - protein, 1286 aa, Homo sapiens
MEKYVRLQKIGEGSFGKAILVKSTEDGRQYVIKEINISRMSSKEREESRREVAVLANMKHPNIVQYRESFEENGSLYIVMDYCEGGDLFKRINAQKGVLFQEDQILDWFVQICLALKHVHDRKILHRDIKSQNIFLTKDGTVQLGDFGIARVLNSTVELARTCIGTPYYLSPEICENKPYNNKSDIWALGCVLYELCTLKHAFEAGSMKNLVLKIISGSFPPVSLHYSYDLRSLVSQLFKRNPRDRPSVNSILEKGFIAKRIEKFLSPQLIAEEFCLKTFSKFGSQPIPAKRPASGQNSISVMPAQKITKPAAKYGIPLAYKKYGDKKLHEKKPLQKHKQAHQTPEKRVNTGEERRKISEEAARKRRLEFIEKEKKQKDQIISLMKAEQMKRQEKERLERINRAREQGWRNVLSAGGSGEVKAPFLGSGGTIAPSSFSSRGQYEHYHAIFDQMQQQRAEDNEAKWKREIYGRGLPERGILPGVRPGFPYGAAGHHHFPDADDIRKTLKRLKAVSKQANANRQKGQLAVERAKQVEEFLQRKREAMQNKARAEGHMGILQNLAAMYGGRPSSSRGGKPRNKEEEVYLARLRQIRLQNFNERQQIKAKLRGEKKEANHSEGQEGSEEADMRRKKIESLKAHANARAAVLKEQLERKRKEAYEREKKVWEEHLVAKGVKSSDVSPPLGQHETGGSPSKQQMRSVISVTSALKEVGVDSSLTDTRETSEEMQKTNNAISSKREILRRLNENLKAQEDEKGKQNLSDTFEINVHEDAKEHEKEKSVSSDRKKWEAGGQLVIPLDELTLDTSFSTTERHTVGEVIKLGPNGSPRRAWGKSPTDSVLKILGEAELQLQTELLENTTIRSEISPEGEKYKPLITGEKKVQCISHEINPSAIVDSPVETKSPEFSEASPQMSLKLEGNLEEPDDLETEILQEPSGTNKDESLPCTITDVWISEEKETKETQSADRITIQENEVSEDGVSSTVDQLSDIHIEPGTNDSQHSKCDVDKSVQPEPFFHKVVHSEHLNLVPQVQSVQCSPEESFAFRSHSHLPPKNKNKNSLLIGLSTGLFDANNPKMLRTCSLPDLSKLFRTLMDVPTVGDVRQDNLEIDEIEDENIKEGPSDSEDIVFEETDTDLQELQASMEQLLREQPGEEYSEEEESVLKNSDVEPTANGTDVADEDDNPSSESALNEEWHSDNSDGEIASECECDSVFNHLEELRLHLEQEMGFEKFFEVYEKIKAIHEDEDENIEICSKIVQNILGNEHQHLYAKILHLVMADGAYQEDNDE

SEQ ID NO: 96 - protein, 506 aa, Homo sapiens
MDDYMVLRMIGEGSFGRALLVQHESSNQMFAMKEIRLPKSFSNTQNSRKEAVLLAKMKHPNIVAFKESFEAEGHLYIVMEYCDGGDLMQKIKQQKGKLFPEDMILNWFTQMCLGVNHIHKKRVLHRDIKSKNIFLTQNGKVKLGDFGSARLLSNPMAFACTYVGTPYYVPPEIWENLPYNNKSDIWSLGCILYELCTLKHPFQANSWKNLILKVCQGCISPLPSHYSYELQFLVKQMFKRNPSHRPSATTLLSRGIVARLVQKCLPPEIIMEYGEEVLEEIKNSKHNTPRKKTNPSRIRIALGNEASTVQEEEQDRKGSHTDLESINENLVESALRRVNREEKGNKSVHLRKASSPNLHRRQWEKNVPNTALTALENASILTSSLTAEDDRGGSVIKYSKNTTRKQWLKETPDTLLNILKNADLSLAFQTYTIYRPGSEGFLKGPLSEETEASDSVDGGHDSVILDPERLEPGLDEEDTDFEEEDDNPDWVSELKKRAGWQGLCDR

SEQ ID NO: 97 - protein, 348 aa, Homo sapiens
MPGKQSEEGPAEAGASEDSEEEGLGGLTLEELQQGQEAARALEDMMTLSAQTLVRAEVDELYEEVRPLGQGRYGRVLLVTHRQKGTPLALKQLPKPRTSLRGFLYEFCVGLSLGAHSAIVTAYGIGIESAHSYSFLTEPVLHGDLMAFIQPKVGLPQPAVHRCAAQLASALEYIHARGLVYRDLKPENVLVCDPACRRFKLTDFGHTRPRGTLLRLAGPPIPYTAPELCAPPPLPEGLPIQPALDAWALGVLLFCLLTGYFPWDRPLAEADPFYEDFLIWQASGQPRDRPQPWFGLAAAADALLRGLLDPHPRRRSAVIAIREHLGRPWRQREGEAEAVGAVEEEAGQ

SEQ ID NO: 98 - protein, 414 aa, Homo sapiens
MDSETHSGMHRGRGRWRERPGWAGGLCGLRMHPHSGLGAPGLLPQTGAGGASVAVTPNLSRTQKQVARVREDTATALQRLVELTTSRVTPVRSLRDQYHLIRKLGSGSYGRVLLAQPHQGGPAVALKLLRRDLVLRSTFLREFCVGRCVSAHPGLLQTLAGPLQTPRYFAFAQEYAPCGDLSGMLQERGLPELLVKRVVAQLAGALDFLHSRGLVHADVKPDNVLVFDPVCSRVALGDLGLTRPEGSPTPAPPVPLPTAPPELCLLLPPDTLPLRPAVDSWGLGVLLFCAATACFPWDVALAPNPEFEAFAGWVTTKPQPPQPPPPWDQFAPPALALLQGLLDLDPETRSPPLAVLDFLGDDWGLQGNREGPGVLGSAVSYEDREEGGSSLEEWTDEGDDSKSGGRTGTDGGAP

SEQ ID NO: 99 - protein, 507 aa, Homo sapiens
MAAPEPAPRRAREREREREDESEDESDILEESPCGRWQKRREQVNQGNMPGLQSTFLAMDTEEGVEVVWNELHFGDRKAFAAHEEKIQTVFEQLVLVDHPNIVKLHKYWLDTSEACARVIFITEYVSSGSLKQFLKKTKKNHKAMNARAWKRWCTQILSALSFLHACSPPIIHGNLTSDTIFIQHNGLIKIGSVWHRIFSNALRPPTALPDDLRSPIRAEREELRNLHFFPPEYGEVADGTAVDIFSFGMCALEMAVLEIQTNGDTRVTEEAIARARHSLSDPNMREFILCCLARDPARRPSAHSLLFHRVLFEVHSLKLLAAHCFIQHQYLMPENVVEEKTKAMDLHAVLAELPRPRRPPLQWRYSEVSFMELDKFLEDVRNGIYPLMNFAATRPLGLPRVLAPPPEEVQKAKTPTPEPFDSETRKVIQMQCNLERSEDKARWHLTLLLVLEDRLHRQLTYDLLPTDSAQDLASELVHYGFLHEDDRMKLAAFLESTFLKYRGTQA

SEQ ID NO: 100 - protein, 646 aa, Homo sapiens
MEPAAGFLSPRPFQRAAAAPAPPAGPGPPPSALRGPELEMLAGLPTSDPGRLITDPRSGRTYLKGRLLGKGGFARCYEATDTETGSAYAVKVIPQSRVAKPHQREKILNEIELHRDLQHRHIVRFSHHFEDADNIYIFLELCSRKSLAHIWKARHTLLEPEVRYYLRQILSGLKYLHQRGILHRDLKLGNFFITENMELKVGDFGLAARLEPPEQRKKTICGTPNYVAPEVLLRQGHGPEADVWSLGCVMYTLLCGSPPFETADLKETYRCIKQVHYTLPASLSLPARQLLAAILRASPRDRPSIDQILRHDFFTKGYTPDRLPISSCVTVPDLTPPNPARSLFAKVTKSLFGRKKKSKNHAQERDEVSGLVSGLMRTSVGHQDARPEAPAASGPAPVSLVETAPEDSSPRGTLASSGDGFEEGLTVATVVESALCALRNCIAFMPPAEQNPAPLAQPEPLVWVSKWVDYSNKFGFGYQLSSRRVAVLFNDGTHMALSANRKTVHYNPTSTKHFSFSVGAVPRALQPQLGILRYFASYMEQHLMKGGDLPSVEEVEVPAPPLLLQWVKTDQALLMLFSDGTVQVNFYGDHTKLILSGWEPLLVTFVARNRSACTYLASHLRQLGCSPDLRQRLRYALRLLRDRSPA

SEQ ID NO: 101 - protein, 933 aa, Homo sapiens
MESMLNKLKSTVTKVTADVTSAVMGNPVTREFDVGRHIASGGNGLAWKIFNGTKKSTKQEVAVFVFDKKLIDKYQKFEKDQIIDSLKRGVQQLTRLRHPRLLTVQHPLEESRDCLAFCTEPVFASLANVLGNWENLPSPISPDIKDYKLYDVETKYGLLQVSEGLSFLHSSVKMVHGNITPENIILNKSGAWKIMGFDFCVSSTNPSEQEPKFPCKEWDPNLPSLCLPNPEYLAPEYILSVSCETASDMYSLGTVMYAVFNKGKPIFEVNKQDIYKSFSRQLDQLSRLGSSSLTNIPEEVREHVKLLLNVTPTVRPDADQMTKIPFFDDVGAVTLQYFDTLFQRDNLQKSQFFKGLPKVLPKLPKRVIVQRILPCLTSEFVNPDMVPFVLPNVLLIAEECTKEEYVKLILPELGPVFKQQEPIQASNMILLIFLQKMDLLLTKTPPDEIKNSVLPMVYRALEAPSIQIQELCLNIIPTFANLIDYPSMKNALIPRIKNACLQTSSLAVRVNSLVCLGKILEYLDKWFVLDDILPFLQQIPSKEPAVLMGILGIYKCTFTHKKLGITKEQLAGKVLPHLIPLSIENNLNLNQFNSFISVIKEMLNRLESEHKTKLEQLHIMQEQQKSLDIGNQMNVSEEMKVTNIGNQQIDKVFNNIGADLLTGSESENKEDGLQNKHKRASLTLEEKQKLAKEQEQAQKLKSQQPLKPQVHTPVATVKQTKDLTDTLMDNMSSLTSLSVSTPKSSASSTFTSVPSMGIGMMFSTPTDNTKRNLTNGLNANMGFQTSGFNMPVNTNQNFYSSPSTVGVTKMTLGTPPTLPNFNALSVPPAGAKQTQQRPTDMSALNNLFGPQKPKVSMNQLSQQKPNQWLNQFVPPQGSPTMGSSVMGTQMNVIGQSAFGMQGNPFFNPQNFAQPPTTMTNSSSASNDLKDLFG

SEQ ID NO: 102 - protein, 688 aa, Homo sapiens
MSVNSEKSSSSERPEPQQKAPLVPPPPPPPPPPPPPLPDPTPPEPEEEILGSDDEEQEDPADYCKGGYHPVKIGDLFNGRYHVIRKLGWGHFSTVWLCWDMQGKRFVAMKVVKSAQHYTETALDEIKLLKCVRESDPSDPNKDMVVQLIDDFKISGMNGIHVCMVFEVLGHHLLKWIIKSNYQGLPVRCVKSIIRQVLQGLDYLHSKCKIIHTDIKPENILMCVDDAYVRRMAAEATEWQKAGAPPPSGSAVSTAPQQKPIGKISKNKKKKLKKKQKRQAELLEKRLQEIEELEREAERKIIEENITSAAPSNDQDGEYCPEVKLKTTGLEEAAEAETAKDNGEAEDQEEKEDAEKENIEKDEDDVDQELANIDPTWIESPKTNGHIENGPFSLEQQLDDEDDDEEDCPNPEEYNLDEPNAESDYTYSSSYEQFNGELPNGRHKIPESQFPEFSTSLFSGSLEPVACGSVLSEGSPLTEQEESSPSHDRSRTVSASSTGDLPKAKTRAADLLVNPLDPRNADKIRVKIADLGNACWVHKHFTEDIQTRQYRSIEVLIGAGYSTPADIWSTACMAFELATGDYLFEPHSGEDYSRDEDHIAHIIELLGSIPRHFALSGKYSREFFNRRGELRHITKLKPWSLFDVLVEKYGWPHEDAAQFTDFLIPMLEMVPEKRASAGECLRHPWLNS

SEQ ID NO: 103 - protein, 787 aa, Homo sapiens
MSVQSSSGSLEGPPSWSQLSTSPTPGSAAAARSLLNHTPPSGRPREGAMDELHSLDPRRQELLEARFTGVASGSTGSTGSCSVGAKASTNNESSNHSFGSLGSLSDKESETPEKKQSESSRGRKRKAENQNESSQGFPNLPVFQSLAYWEMGRTAGGKSIGGRGHKISDYFEYQGGNGSSPVRGIPPAIRSPQNSHSHSTPSSSVRPNSPSPTALAFGDHPIVQPKQLSFKIIQTDLTMLKLAALESNKIQDLEKKEGRIDDLLRANCDLRRQIDEQQKLLEKYKERLNKCISMSKKLLIEKSTQEKLSSREKSMQDRLRLGHFTTVRHGASFTEQWTDGFAFQNLVKQQEWVNQQREDIERQRKLLAKRKPPTANNSQAPSTNSEPKQRKNKAVNGAENDPFVRPNLPQLLTLAEYHEQEEIFKLRLGHLKKEEAEIQAELERLERVRNLHIRELKRINNEDNSQFKDHPTLNERYLLLHLLGRGGFSEVYKAFDLYEQRYAAVKIHQLNKSWRDEKKENYHKHACREYRIHKELDHPRIVKLYDYFSLDTDTFCTVLEYCEGNDLDFYLKQHKLMSEKEARSIVMQIVNALRYLNEIKPPIIHYDLKPGNILLVDGTACGEIKITDFGLSKIMDDDSYGVDGMDLTSQGAGTYWYLPPECFVVGKEPPKISNKVDVWSVGVIFFQCLYGRKPFGHNQSQQDILQENTILKATEVQFPVKPVVSSEAKAFIRRCLAYRKEDRFDVHQLANDPYLLPHMRRSNSSGNLHMAGLTASPTPPSSSIITY

SEQ ID NO: 104 - protein, 632 aa, Homo sapiens
MLGPGSNRRRPTQGERGPGSPGEPMEKYQVLYQLNPGALGVNLVVEEMETKVKHVIKQVECMDDHYASQALEELMPLLKLRHAHISVYQELFITWNGEISSLYLCLVMEFNELSFQEVIEDKRKAKKIIDSEWMQNVLGQVLDALEYLHHLDIIHRNLKPSNIILISSDHCKLQDLSSNVLMTDKAKWNIRAEEDPFRKSWMAPEALNFSFSQKSDIWSLGCIILDMTSCSFMDGTEAMHLRKSLRQSPGSLKAVLKTMEEKQIPDVETFRNLLPLMLQIDPSDRITIKDVVHITFLRGSFKSSCVSLTLHRQMVPASITDMLLEGNVASILGDAGDTKGERALKLLSMALASYCLVPEGSLFMPLALLHMHDQWLSCDQDRVPGKRDFASLGKLGKLLGPIPKGLPWPPELVEVVVTTMELHDRVLDVQLCACSLLLHLLGQGIIVNKAPLEKVPDLISQVLATYPADGEMAEASCGVFWLLSLLGCIKEQQFEQVVALLLQSIRLCQDRALLVNNAYRGLASLVKVSELAAFKVVVQEEGGSGLSLIKETYQLHRDDPEVVENVGMLLVHLASYEEILPELVSSSMKALLQEIKERFTSSLELVSCAEKVLLRLEAATSPSPLGGEAAQP

SEQ ID NO: 105 - protein, 929 aa, Homo sapiens [sequence omitted]

SEQ ID NO: 106 - protein, 401 aa, Homo sapiens
METGKDGARRGTQSPERKRRSPVPRAPSTKLRPAAAARAMDPVAAEAPGEAFLARRRPEGGGGSARPRYSLLAEIGRGSYGVVYEAVAGRSGARVAVKKIRCDAPENVELALAEFWALTSLKRRHQNVVQFEECVLQRNGLAQRMSHGNKSSQLYLRLVETSLKGERILGYAEEPCYLWFVMEFCEGGDLNQYVLSRRPDPATNKSFMLQLTSAIAFLHKNHIVHRDLKPDNILITERSGTPILKVADFGLSKVCAGLAPRGKEGNQDNKNVNVNKYWLSSACGSDFYMAPEVWEGHYTAKADIFALGIIIWAMIERITFIDSETKKELLGTYIKQGTEIVPVGEALLENPKMELHIPQKRRTSMSEGIKQLLKDMLAANPQDRPDAFELETRMDQVTCAA

SEQ ID NO: 107 - protein, 567 aa, Homo sapiens
MDDKDIDKELRQKLNFSYCEETEIEGQKKVEESREASSQTPEKGEVQDSEAKGTPPWTPLSNVHELDTSSEKDKESPDQILRTPVSHPLKCPETPAQPDSRSKLLPSDSPSTPKTMLSRLVISPTGKLPSRGPKHLKLTPAPLKDEMTSLALVNINPFTPESYKKLFLQSGGKRKIRGDLEEAGPEEGKGGLPAKRCVLRETNMASRYEKEFLEVEKIGVGEFGTVYKCIKRLDGCVYAIKRSMKTFTELSNENSALHEVYAHAVLGHHPHVVRYYSSWAEDDHMIIQNEYCNGGSLQAAISENTKSGNHFEEPKLKDILLQISLGLNYIHNSSMVHLDIKPSNIFICHKMQSESSGVIEEVENEADWFLSANVMYKIGDLGHATSINKPKVEEGDSRFLANEILQEDYRHLPKADIFALGLTIAVAAGAESLPTNGAAWHHIRKGNFPDVPQELSESFSSLLKNMIQPDAEQRPSAAALARNTVLRPSLGKTEELQQQLNLEKFKTATLERELREAQQAQSPQGYTHHGDTGVSGTHTGSRSTKRLVGGKSARSSSFTSGEREPLH

SEQ ID NO: 108 - protein, 2245 aa, Homo sapiens
MEPGRGAGPAGMAEPRAKAARPGPQRFLRRSVVESDQEEPPGLEAAEAPGPQPPQPLQRRVLLLCKTRRLIAERARGRPAAPAPAALVAQPGAPGAPADAGPEPVGTQEPGPDPIAAAVETAPAPDGGPREEAAATVRKEDEGAAEAKPEPGRTRRDEPEEEEDDEDDLKAVATSLDGRFLKFDIELGRGSFKTVYKGLDTETWVEVAWCELQDRKLTKLERQRFKEEAEMLKGLQHPNIVRFYDFWESSAKGKRCIVLVTELMTSGTLKTYLKRFKVMKPKVLRSWCRQILKGLLFLHTRTPPIIHRDLKCDNIFITGPTGSVKIGDLGLATLKRASFAKSVIGTPEFMAPEMYEEHYDESVDVYAFGMCMLEMATSEYPYSECQNAAQIYRKVTCGIKPASFEKVHDPEIKEIIGECICKNKEERYEIKDLLSHAFFAEDTGVRVELAEEDHGRKSTIALRLWVEDPKKLKGKPKDNGAIEFTFDLEKETPDEVAQEMIESGFFHESDVKIVAKSIRDRVALIQWRRERIWPALQPKEQQDVGSPDKARGPPVPLQVQVTYHAQAGQPGPPEPEEPEADQHLLPPTLPTSATSLASDSTFDSGQGSTVYSDSQSSQQSVMLGSLADAAPSPAQCVCSPPVSEGPVLPQSLPSLGAYQQPTAAPGLPVGSVPAPACPPSLQQHFPDPAMSFAPVLPPPSTPMPTGPGQPAPPGQQPPPLAQPTPLPQVLAPQPVVPLQPVPPHLPPYLAPASQVGAPAQLKPLQMPQAPLQPLAQVPPQMPPIPVVPPITPLAGIDGLPPALPDLPTATVPPVPPPQYFSPAVILPSLAAPLPPASPALPLQAVKLPHPPGAPLAMPCRTIVPNAPATIPLLAVAPPGVAALSIHSAVAQLPGQPVYPAAFPQMAPTDVPPSPHHTVQNMRATPPQPALPPQPTLPPQPVLPPQPTLPPQPVLPPQPTRPPQPVLPPQPMLPPQPVLPPQPALPVRPEPLQPHLPEQAAPAATPGSQILLGHPAPYAVDVAAQVPTVPVPPAAVLSPPLPEVLLPAAPELLPQFPSSLATVSASVQSVPTQTATLLPPANPPLPGGPGIASPCPTVQLTVEPVQEEQASQDKPPGLPQSCESYGGSDVTSGKELSDSCEGAFGGGRLEGRAARKHHRRSTRARSRQERASRPRLTILNVCNTGDKMVECQLETHNHKMVTFKFDLDGDAPDEIATYMVEHDFILQAERETFIEQMKDVMDKAEDMLSEDTDADRGSDPGTSPPHLSTCGLGTGEESRQSQANAPVYQQNVLHTGKRWFIICPVAEHPAPEAPESSPPLPLSSLPPEASQDSAPYKDQLSSKEQPSFLASQQLLSQAGPSNPPGAPPAPLAPSSPPVTALPQDGAAPATSTMPEPASGTASQAGGPGTPQGLTSELETSQPLAETHEAPLAVQPLVVGLAPCTPAPEAASTRDASAPREPLPPPAPEPSPHSGTPQPALGQPAPLLPAAVGAVSLATSQLPSPPLGPTVPPQPPSALESDGEGPPPRVGFVDSTIKSLDEKLRTLLYQEHVPTSSASAGTPVEVGDRDFTLEPLRGDQPRSEVCGGDLALPPVPKEAVSGRVQLPQPLVEKSELAPTRGAVMEQGTSSSMTESSPRSMLGYDRDGRQVASDSHVVPSVPQDVPAFVRPARVEPTDRDGGEAGESSAEPPPSDMGTVGGQASHPQTLGARALGSPRKRPEQQDVSSPAKTVGRFSVVSTQDEWTLASPHSLRYSAPPDVYLDEAPSSPDVKLAVRRAQTASSIEVGVGEPVSSDSGDEGPRARPPVQKQASLPVSGSVAGDFVKKATAFLQRPSRAGSLGPETPSRVGMKVPTISVTSFHSQSSYISSDNDSELEDADIKKELQSLREKHLKEISELQSQQKQEIEALYRRLGKPLPPNVGFFHTAPPTGRRRKTSKSKLKAGKLLNPLVRQLKVVASSTGHLADSSRGPPAKDPAQASVGLTADSTGLSGKAVQTQQPCSVRASLSSDICSGLASDGGGARGQGWTVYHPTSERVTYKSSSKPRARFLSGPVSVSIWSALKRLCLGKEHSSRSSTSSLAPGPEPGPQPALHVQAQVNNSNNKKGTFTDDLHKLVDEWTSKTVGAAQLKPTLNQLKQTQKLQDMEAQAGWAAPGEARAMTAPRAGVGMPRLPPAPGPLSTTVIPGAAPTLSVPTPDGALGTARRNQVWFGLRVPPTACCGHSTQPRGGQRVGSKTASFAASDPVRS

SEQ ID NO: 109 - protein, 1511 aa, Homo sapiens
MAAAAGNRASSSGFPGARATSPEAGGGGGALKASSAPAAAAGLLREAGSGGRERADWRRRQLRKVRSVELDQLPEQPLFLAASPPASSTSPSPEPADAAGSGTGFQPVAVPPPHGAASRRGAHLTESVAAPDSGASSPAAAEPGEKRAPAAEPSPAAAPAGREMENKETLKGLHKMDDRPEERMIREKLKATCMPAWKHEWLERRNRRGPVVVKPIPVKGDGSEMNHLAAESPGEVQASAASPASKGRRSPSPGNSPSGRTVKSESPGVRRKRVSPVPFQSGRITPPRRAPSPDGFSPYSPEETNRRVNKVMRARLYLLQQIGPNSFLIGGDSPDNKYRVFIGPQNCSCARGTFCIHLLFVMLRVFQLEPSDPMLWRKTLKNFEVESLFQKYHSRRSSRIKAPSRNTIQKFVSRMSNSHTLSSSSTSTSSSENSIKDEEEQMCPICLLGMLDEESLTVCEDGCRNKLHHHCMSIWAEECRRNREPLICPLCRSKWRSHDFYSHELSSPVDSPSSLRAAQQQTVQQQPLAGSRRNQESNFNLTHYGTQQIPPAYKDLAEPWIQVFGMELVGCLFSRNWNVREMALRRLSHDVSGALLLANGESTGNSGGSSGSSPSGGATSGSSQTSISGDVVEACCSVLSMVCADPVYKVYVAALKTLRAMLVYTPCHSLAERIKLQRLLQPVVDTILVKCADANSRTSQLSISTLLELCKGQAGELAVGREILKAGSIGIGGVDYVLNCILGNQTESNNWQELLGRLCLIDRLLLEFPAEFYPHIVSTDVSQAEPVEIRYKKLLSLLTFALQSINNSHSMVGKLSRRIYLSSARMVTTVPHVFSKLLEMLSVSSSTHFTRMRRRLMAIADEVEIAEAIQLGVEDTLDGQQDSFLQASVPNNYLETTENSSPECTIHLEKTGKGLCATKLSASSEDISERLASISVGPSSSTTTTTTTEQPKPMVQTKGRPHSQCLNSSPLSHHSQLMFPALSTPSSSTPSVPAGTATDVSKHRLQGFIPCRIPSASPQTQRKFSLQFHRNCPENKDSDKLSPVFTQSRPLPSSNIHRPKPSRPTPGNTSKQGDPSKNSMTLDLNSSSKCDDSFGCSSNSSNAVIPSDETVFTPVEEKCRLDVNTELNSSIEDLLEASMPSSDTTVTFKSEVAVLSPEKAENDDTYKDDVNHNQKCKEKMEAEEEEALAIAMAMSASQDALPIVPQLQVENGEDIIIIQQDTPETLPGHTKAKQPYREDTEWLKGQQIGLGAFSSCYQAQDVGTGTLMAVKQVTYVRNTSSEQEEVVEALREEIRMMSHLNHPNIIRMLGATCEKSNYNLFIEWMAGGSVAHLLSKYGAFKESVVINYTEQLLRGLSYLHENQIIHRDVKGANLLIDSTGQRLRIADFGAAARLASKGTGAGEFQGQLLGTIAFMAPEVLRGQQYGRSCDVWSVGCAIIEMACAKPPWNAEKHSNHLALIFKIASATTAPSIPSHLSPGLRDVALRCLELQPQDRPPSRELLKHPVFRTTW

SEQ ID NO: 110 - protein, 735 aa, Homo sapiens
MPQIAKKQSTHRTQKPKKQSFPCICKNPGTQKSCVPLSVQPTEPRLNYLDLKYSDMFKEINSTANGPGIYEMFGTPVYCHVRETERDENTYYREICSAPSGRRITNKCRSSHSERKSNIRTRLSQKKTHMKCPKTSFGIKQEHKVLISKEKSSKAVHSNLHDIENGDGISEPDWQIKSSGNEFLSSKDEIHPMNLAQTPEQSMKQNEFPPVSDLSIVEEVSMEESTGDRDISNNQILTTSLRDLQELEELHHQIPFIPSEDSWAVPSEKNSNKYVQQEKQNTASLSKVNASRILTNDLEFDSVSDHSKTLTNFSFQAKQESASSQTYQYWVHYLDHDSLANKSITYQMFGKTLSGTNSISQEIMDSVNNEELTDELLGCLAAELLALDEKDNNSCQKMANETDPENLNLVLRWRGSTPKEMGRETTKVKIQRHSSGLRIYDREEKFLISNEKKIFSENSLKSEEPILWTKGEILGKGAYGTVYCGLTSQGQLIAVKQVALDTSNKLAAEKEYRKLQEEVDLLKALKHVNIVAYLGTCLQENTVSIFMEFVPGGSISSIINRFGPLPEMVFCKYTKQILQGVAYLHENCVVHRDIKGNNVMLMPTGIIKLIDFGCARRLAWAGLNGTHSDMLKSMHGTPYWMAPEVINESGYGRKSDIWSIGCTVFEMATGKPPLASMDRMAAMFYIGAHRGLMPPLPDHFSENAADFVRMCLTRDQHERPSALQLLKHSFLERSH

SEQ ID NO: 111 - protein, 593 aa, Mus musculus
MFGKKKKRVEISAPSNFEHRVHTGFDQHEQKFTGLPRQWQSLIEESARRPKPLIDPACITSIQPGAPKTIVRGSKGAKDGALTLLLDEFENMSVTRSNSLRRESPPPPARAHQENGMLEERAAPARMAPDKAGSRARATGHSEAGSGSGDRRRVGPEKRPKSSRDGPGGPQEASRDKRPLSGPDVSTPQPGSLTSGTKLAAGRPFNTYPRADTDHPPRGAQGEPHTMAPNGPSATGLAAPQSSSSSRPPTRARGAPSPGVLGPHASEPQLAPPARALAAPAVPPAPGPPGPRSPQREPQRVSHEQFRAALQLVVDPGDPRSYLDNFIKIGEGSTGIVCIATVRSSGKLVAVKKMDLRKQQRRELLFNEVVIMRDYRHENVVEMYNSYLVGDELWVVMEFLEGGALTDIVTHTRMNEEQIAAVCLAVLQALAVLHAQGVIHRDIKSDSILLTHDGRVKLSDFGFCAQVSKEVPRRKSLVGTPYWMAPELISRLPYGPEVDIWSLGVMVIEMVDGEPPYFNEPPLKAMKMIRDNLPPRLKNLHKASPSLKGFLDRLLVRDPAQRATAAELLKHPFLTKAGPPASIVPLMRQHRTR

SEQ ID NO: 112 - protein, 418 aa, Homo sapiens [sequence omitted]

SEQ ID NO: 113 - protein, 380 aa, Homo sapiens
MLARRKPMLPALTINPTIAEGPSPTSEGASEANLVDLQNKLEELELDEQQKRLEAFLTQKAKVGELKDDDFERTSELDAGNGGVVTKVQHRPSGLIMARKLIHLEIKPAIRNQIIREHQVLHECNSPYIVGFYGAFYCDREISICMEHMDGGSLDQGLKEAKRIPEDILGKVSIAVLRGLAYLREKHQIMHRNVKPSNILVNSRGEIKLCDFGVSGQLIDSMANSFVGTRSYMAPERLQGTHYSVQSVIWSMDLSLVELAIERYPIPPPDAKELEAIFGRPVVDREEGEPHSISSWPGSPGRPNSGHGMDSRPAMAIFELLDYIVKEPPPKLPNGVFTPDFQEFVNKCLIKNPTERADLKMLTNHAFIKRSEVKEADFAC

SEQ ID NO: 114 - protein, 1070 aa, Homo sapiens
MGAARGSPARPRRLPLLSVLLLPLLGGTQTAIVFIKQPSSQDALQGRRALLRCEVEAPGPVHVYWLLDGAPVQDTERRFAQGSSLSFAAVDRLQDSGTFQCVARDDVTGEEARSANASFNIKWIEAGPVVLKHPASEAEIQPQTQVTLRCHIDGHPRPTYQWFRDGTPLSDGQSNHTVSSKERNLTLRPAGPEHSGLYSCCAHSAFGQACSSQNFTLSIADESFARVVLAPQDVVVARYEEAMFHCQFSAQPPPSLQWLFEDETPITNRSRPPHLRRATVFANGSLLLTQVRPRNAGIYRCIGQGQRGPPIILEATLHLAEIEDMPLFEPRVFTAGSEERVTCLPPKGLPEPSVWWEHAGVRLPTHGRVYQKGHELVLANIAESDAGVYTCHAANLAGQRRQDVNITVATVPSWLKKPQDSQLEEGKPGYLDCLTQATPKPTVVWYRNQMLISEDSRFEVFKNGTLRINSVEVYDGTWYRCMSSTPAGSIEAQARVQVLEKLKFTPPPQPQQCMEFDKEATVPCSATGREKPTIKWERADGSSLPEWVTDNAGTLHFARVTRDDAGNYTCIASNGPQGQIRAHVQLTVAVFITFKVEPERTTVYQGHTALLQCEAQGDPKPLIQWKGKDRILDPTKLGPRMHIFQNGSLVIHDVAPEDSGRYTCIAGNSCNIKHTEAPLYVVDKPVPEESEGPGSPPPYKMIQTIGLSVGAAVAYIIAVLGLMFYCKKRCKAKRLQKQPEGEEPEMECLNGGPLQNGQPSAEIQEEVALTSLGSGPAATNKRHSTSDKMHFPRSSLQPITTLGKSEFGEVFLAKAQGLEEGVAETLVLVKSLQSKDEQQQLDFRRELEMFGKLNHANVVRLLGLCREAEPHYMVLEYVDLGDLKQFLRISKSKDEKLKSQPLSTKQKVALCTQVALGMEHLSNNRFVHKDLAARNCLVSAQRQVKVSALGLSKDVYNSEYYHFRQAWVPLRWMSPEAILEGDFSTKSDVWAFGVLMWEVFTHGEMPHGGQADDEVLADLQAGKARLPQPEGCPSKLYRLMQRCWALSPKDRPSFSEIASALGDSTVDSKP

SEQ ID NO: 115 - protein, 1374 aa, Homo sapiens [sequence omitted]

SEQ ID NO: 116 - protein, 607 aa, Homo sapiens
MRGAARLGRPGRSCLPGARGLRAPPPPPLLLLLALLPLLPAPGAAAAPAPRPPELQSASAGPSVSLYLSEDEVRRLIGLDAELYYVRNDLISHYALSFSLLVPSETNFLHFTWHAKSKVEYKLGFQVDNVLAMDMPQVNISVQGEVPRTLSVFRVELSCTGKVDSEVMILMQLNLTVNSSKNFTVLNFKRRKMCYKKLEEVKTSALDKNTSRTIYDPVHAAPTTSTRVFYISVGVCCAVIFLVAIILAVLHLHSMKRIELDDSISASSSSQGLSQPSTQTTQYLRADTPNNATPITSYPTLRIEKNDLRSVTLLEAKGKVKDIAISRERITLKDVLQEGTFGRIFHGILIDEKDPNKEKQAFVKTVKDQASEIQVTMMLTESCKLRGLHHRNLLPITHVCIEEGEKPMVILPYMNWGNLKLFLRQCKLVEANNPQAISQQDLVHMAIQIACGMSYLARREVIHKDLAARNCVIDDTLQVKITDNALSRDLFPMDYHCLGDNENRPVRWMALESLVNNEFSSASDVWAFGVTLWELMTLGQTPYVDIDPFEMAAYLKDGYRIAQPINCPDELFAVMACCWALDPEERPKFQQLVQCLTEFHAALGAYV

SEQ ID NO: 117 - protein, 2534 aa, Homo sapiens
MASGSCQGCEEDEETLKKLIVRLNNVQEGKQIETLVQILEDLLVFTYSEHASKLFQGKNIHVPLLIVLDSYMRVASVQQVGWSLLCKLIEVCPGTMQSLMGPQDVGNDWEVLGVHQLILKMLTVHNASVNLSVIGLKTLDLLLTSGKITLLILDEESDIFMLIFDAMHSFPANDEVQKLGCKALHVLFERVSEEQLTEFVENKDYMILLSALTNFKDEEEIVLHVLHCLHSLAIPCNNVEVLMSGNVRCYNIVVEAMKAFPMSERIQEVSCCLLHRLTLGNFFNILVLNEVHEFVVKAVQQYPENAALQISALSCLALLTETIFLNQDLEEKNENQENDDEGEEDKLFWLEACYKALTWHRKNKHVQEAACWALNNLLMYQNSLHEKIGDEDGHFPAHREVMLSMLMHSSSKEVFQASANALSTLLEQNVNFRKILLSKGIHLNVLELMQKHIHSPEVAESGCKMLNHLFEGSNTSLDIMAAVVPKILTVMKRHETSLPVQLEALRAILHFIVPGMPEESREDTEFHHKLNMVKKQCFKNDIHKLVLAALNRFIGNPGIQKCGLKVISSIVHFPDALEMLSLEGAMDSVLHTLQMYPDDQEIQCLGLSLIGYLITKKNVFIGTGHLLAKILVSSLYRFKDVAEIQTKGFQTILAILKLSASFSKLLVHHSFDLVIFHQMSSNIMEQKDQQFLNLCCKCFAKVAMDDYLKNVMLERACDQNNSIMVECLLLLGADANQAKEGSSLICQVCEKESSPKLVELLLNSGSREQDVRKALTISIGKGDSQIISLLLRRLALDVANNSICLGGFCIGKVEPSWLGPLFPDKTSNLRKQTNIASTLARMVIRYQMKSAVEEGTASGSDGNFSEDVLSKFDEWTFIPDSSMDSVFAQSDDLDSEGSEGSFLVKKKSNSISVGEFYRDAVLQRCSPNLQRHSNSLGPIFDHEDLLKRKRKILSSDDSLRSSKLQSHMRHSDSISSLASEREYITSLDLSANELRDIDALSQKCCISVHLEHLEKLELHQNALTSFPQQLCETLKSLTHLDLHSNKFTSFPSYLLKMSCIANLDVSRNDIGPSVVLDPTVKCPTLKQFNLSYNQLSFVPENLTDVVEKLEQLILEGNKISGICSPLRLKELKILNLSKNHISSLSENFLEACPKVESFSARMNFLAAMPFLPPSMTILKLSQNKFSCIPEAILNLPHLRSLDMSSNDIQYLPGPAHWKSLNLRELLFSHNQISILDLSEKAYLWSRVEKLHLSHNKLKEIPPEIGCLENLTSLDVSYNLELRSFPNEMGKLSKIWDLPLDELHLNFDFKHIGCKAKDIIRFLQQRLKKAVPYNRMKLMIVGNTGSGKTTLLQQLMKTKKSDLGMQSATVGIDVKDWPIQIRDKRKRDLVLNVWDFAGREEFYSTHPHFMTQRALYLAVYDLSKGQAEVDAMKPWLFNIKARASSSPVILVGTHLDVSDEKQRKACMSKITKELLNKRGFPAIRDYHFVNATEESDALAKLRKTIINESLNFKIRDQLVVGQLIPDCYVELEKIILSERKNVPIEFPVIDRKRLLQLVRENQLQLDENELPHAVHFLNESGVLLHFQDPALQLSDLYFVEPKWLCKIMAQDVSSIFGLYIRDILTVKVEGCPKHPKGIISRRDVEKFLSKKRKFPKNYMSQYFKLLEKFQIALPIGEEYLLVPSSLSDHRPVIELPHCENSEIIIRLYEMPYFPMGFWSRLINRLLEISPYMLSGRGCILLGQVVDHIDSLMEEWFPGLLEIDICGEGETLLKKWALYSFNDGEEHQKILLDDLMKKAEEGDLLVNPDQPRLTIPISQIAPDLILADLPRNIMLNNDELEFEQAPEFLLDCFVCIHLYPSSDYISRHYMRTINIVQTGFAKCRWRVTVHGADHGDGSFGSVYRAAYEGEEVAVKIFNKHTSLRLLRQELVVLCHLHHPSLISLLAAGIRPRMLVMELASKGSLDRLLQQDKASLTRTLQHRIALHVADGLRYLHSAMIIYRDLKPHNVLLFTLYPNAAIIAKIADYGIAQYCCRMGIKTSEGTPGFRAPEVARGNVIYNQQADVYSFGLLLYDILTTGGRIVEGLKFPNEFDELEIQGKLPDPVKEYGCAPWPMVEKLIKQCLKENPQERPTSAQVFDILNSAELVCLTRRILLPKNVIVECMVATHHNSRNASIWLGCGHTDRGQLSFLDLNTEGYTSEEVADSRILCLALVHLPVEKESWIVSGTQSGTLLVINTEDGKKRHTLEKMTDSVTCLYCNSFSKQSKQKNFLLVGTADGKLAIFEDKTVKLKGAAPLKILNIGNVSTPLMCLSESTNSTERNVMWGGCGTKIFSFSNDFTIQKLIETRTSQLFSYAAFSDSNIITVVVDTALYIAKQNSPVVEVWDKKTEKLCGLIDCVHFLREVMVKENKESKHKMSYSGRVKTLCLQKNTALWIGTGGGHILLLDLSTRRLIRVIYNFCNSVRVMMTAQLGSLKNVMLVLGYNRKNTEGTQKQKEIQSCLTVWDINLPHEVQNLEKHIEVRKELAEKMRRTSVE

SEQ ID NO: 118 - protein, 1036 aa, Homo sapiens
MALRGAAGATDTPVSSAGGAPGGSASSSSTSSGGSASAGAGLWAALYDYEARGEDELSLRRGQLVEVLSQDAAVSGDEGWWAGQVQRRLGIFPANYVAPCRPAASPAPPPSRPSSPVHVAFERLELKELIGAGGFGQVYRATWQGQEVAVKAARQDPEQDAAAAAESVRREARLFAMLRHPNIIELRGVCLQQPHLCLVLEFARGGALNRALAAANAAPDPRAPGPRRARRIPPHVLVNWAVQIARGMLYLHEEAFVPILHRDLKSSNILLLEKIEHDDICNKTLKITDFGLAREWHRTTKMSTAGTYAWMAPEVIKSSLFSKGSDIWSYGVLLWELLTGEVPYRGIDGLAVAYGVAVNKLTLPIPSTCPEPFAKLMKECWQQDPHIRPSFALILEQLTAIEGAVMTEMPQESFHSMQDDWKLEIQQMFDELRTKEKELRSREEELTRAALQQKSQEELLKRREQQLAEREIDVLERELNILIFQLNQEKPKVKKRKGKFKRSRLKLKDGHRISLPSDFQHKITVQASPNLDKRRSLNSSSSSPPSSPTMMPRLRAIQLTSDESNKTWGRNTVFRQEEFEDVKRNFKKKGCTWGPNSIQMKDRTDCKERIRPLSDGNSPWSTILIKNQKTMPLASLFVDQPGSCEEPKLSPDGLEHRKPKQIKLPSQAYIDLPLGKDAQRENPAEAESWEEAASANAATVSIEMTPTNSLSRSPQRKKTESALYGCTVLLASVALGLDLRELHKAQAAEEPLPKEEKKKREGIFQRASKSRRSASPPTSLPSTCGEASSPPSLPLSSALGILSTPSFSTKCLLQMDSEDPLVDSAPVTCDSEMLTPDFCPTAPGSGREPALMPRLDTDCSVSRNLPSSFLQQTCGNVPYCASSKHRPSHHRRTMSDGNPTPTGATIISATGASALPLCPSPAPHSHLPREVSPKKHSTVHIVPQRRPASLRSRSDLPQAYPQTAVSQLAQTACVVGRPGPHPTQFLAAKERTKSHVPSLLDADVEGQSRDYTVPLCRMRSKTSRPSIYELEKEFLS

SEQ ID NO: 119 - protein, 901 aa, Homo sapiens
MDRAALRAAAMGEKKEGGGGGDAAAAEGGAGAAASRALQQCGQLQKLIDISIGSLRGLRTKCAVSNDLTQQEIRTLEAKLVRYICKQRQCKLSVAPGERTPELNSYPRFSDWLYTFNVRPEVVQEIPRDLTLDALLEMNEAKVKETLRRCGASGDECGRLQYALTCLRKVTGLGGEHKEDSSWSSLDARRESGSGPSTDTLSAASLPWPPGSSQLGRAGNSAQGPRSISVSALPASDSPTPSFSEGLSDTCIPLHASGRLTPRALHSFITPPTTPQLRRHTKLKPPRTPPPPSRKVFQLLPSFPTLTRSKSHESQLGNRIDDVSSMRFDLSHGSPQMVRRDIGLSVTHRFSTKSWLSQVCHVCQKSMIFGVKCKHCRLKCHNKCTKEAPACRISFLPLTRLRRTESVPSDINNPVDRAAEPHFGTLPKALTKKEHPPAMNHLDSSSNPSSTTSSTPSSPAPFPTSSNPSSATTPPNPSPGQRDSRFNFPAAYFIHHRQQFIFPDISAFAHAAPLPEAADGTRLDDQPKADVLEAHEAEAEEPEAGKSEAEDDEDEVDDLPSSRRPWRGPISRKASQTSVYLQEWDIPFEQVELGEPIGQGRWGRVHRGRWHGEVAIRLLEMDGHNQDHLKLFKKEVMNYRQTRHENVVLFMGACMNPPHLAIITSFCKGRTLHSFVRDPKTSLDINKTRQIAQEIIKGMGYLHAKGIVHKDLKSKNVFYDNGKVVITDFGLFGISGVVREGRRENQLKLSHDWLCYLAPEIVREMTPGKDEDQLPFSKAADVYAFGTVWYELQARDWPLKNQAAEASIWQIGSGEGMKRVLTSVSLGKEVSEILSACWAFDLQERPSFSLLMDMLEKLPKLNRRLSHPGHFWKSADINSSKVVPRFERFGLGVLESSNPKM

SEQ ID NO: 120 - protein, 982 aa, Homo sapiens
MGAAGQMQASSLTRAQLAAGKEEEGKGVAEQAMDEENMTKSEEQQPLSLQKALQQCELVQNMIDLSISNLEGLRTKCATSNDLTQKEIRTLESKLVKYFSRQLSCKKKVALQERNAELDGFPQLRHWFRIVDVRKEVLEEISPGQLSLEDLLEMTDEQVCETVEKYGANREECARLNASLSCLRNVHMSGGNLSKQDWTIQWPTTETGKENNPVCPPEPTPWIRTHLSQSPRVPSKCVQHYCHTSPTPGAPVYTHVDRLTVDAYPGLCPPPPLESGHRSLPPSPRQRHAVRTPPRTPNIVTTVTPPGTPPMRKKNKLKPPGTPPPSSRKLIHLIPGFTALHRSKSHEFQLGHRVDEAHTPKAKKKSKPLNLKIHSSVGSCENIPSQQRSPLLSERSLRSFFVGHAPFLPSTPPVHTEANFSANTLSVPRWSPQIPRRDLGNSIKHRFSTKYWMSQTCTVCGKGMLFGLKCKNCKLKCHNKCTKEAPPCHLLIIHRGDPARLVRTESVPCDINNPLRKPPRYSDLHISQTLPKTNKINKDHIPVPYQPDSSSNPSSTTSSTPSSPAPPLPPSATPPSPLHPSPQCTRQQKNFNLPASHYYKYKQQFIFPDVVPVPETPTRAPQVILHPVTSNPILEGNPLLQIEVEPTSENEEVHDEAEESEDDFEEMNLSLLSARSFPRKASQTSIFLQEWDIPFEQLEIGELIGKGRFGQVYHGRWHGEVAIRLIDIERDNEDQLKAFKREVMAYRQTRHENVVLFMGACMSPPHLAIITSLCKGRTLYSVVRDAKIVLDVNKTRQIAQEIVKGMGYLHAKGILHKDLKSKNVFYDNGKVVITDFGLFSISGVLQAGRREDKLRIQNGWLCHLAPEIIRQLSPDTEEDKLPFSKHSDVFALGTIWYELHAREWPFKTQPAEAIIWQMGTGMKPNLSQIGMGKEISDILLFCWAFEQEERPTFTKLMDMLEKLPKRNRRLSHPGHFWKSAEL

SEQ ID NO: 121 - protein, 537 aa, Homo sapiens
MGATGAAEPLQSVLWVKQQRCAVSLEPARALLRWWRSPGPGAGAPGADACSVPVSEIIAVEETDVHGKHQGSGKWQKMEKPYAFTVHCVKRARRHRWKWAQVTFWCPEEQLCHLWLQTLREMLEKLTSRPKHLLVFINPFGGKGQGKRIYERKVAPLFTLASITTDIIVTEHANQAKETLYEINIDKYDGIVCVGGDGMFSEVLHGLIGRTQRSAGVDQNHPRAVLVPSSLRIGIIPAGSTDCVCYSTVGTSDAETSALHIVVGDSLAMDVSSVHHNSTLLRYSVSLLGYGFYGDIIKDSEKKRWLGLARYDFSGLKTFLSHHCYEGTVSFLPAQHTVGSPRDRKPCRAGCFVCRQSKQQLEEEQKKALYGLEAAEDVEEWQVVCGKFLAINATNMSCACRRSPRGLSPAAHLGDGSSDLILIRKCSRFNFLRFLIRHTNQQDQFDFTFVEVYRVKKFQFTSKHMEDEDSDLKEGGKKRFGHICSSHPSCCCTVSNSSWNCDGEVLHSPAIEVRVHCQLVRLFARGIEENPKPDSHS

SEQ ID NO: 122 - protein, 804 aa, Homo sapiens [sequence omitted]

SEQ ID NO: 123 - protein, 441 aa, Homo sapiens
MCVCQTMEVGQYGKNASRAGDRGVLLEPFIHQVGGHSSMMRYDDHTVCKPLISREQRFYESLPPEMKEFTPEYKGVVSVCFEGDSDGYINLVAYPYVESETVEQDDTTEREQPRRKHSRRSLHRSGSGSDHKEEKASLSLETSESSQEAKSPKVELHSHSEVPFQMLDGNSGLSSEKISHNPWSLRCHKQQLSRMRSESKDRKLYKFLLLENVVHHFKYPCVLDLKMGTRQHGDDASAEKAARQMRKCEQSTSATLGVRVCGMQVYQLDTGHYLCRNKYYGRGLSIEGFRNALYQYLHNGLDLRRDLFEPILSKLRGLKAVLERQASYRFYSSSLLVIYDGKECRAESCLDRRSEMRLKHLDMVLPEVASSCGPSTSPSNTSPEAGPSSQPKVDVRMIDFAHSTFKGFRDDPTVHDGPDRGYVFGLENLISIMEQMRDENQ

SEQ ID NO: 124 - protein, 647 aa, Homo sapiens
MAAILGDTIMVAKGLVKLTQAAVETHLQHLGIGGELIMAARALQSTAVEQIGMFLGKVQGQDKHEEYFAENFGGPEGEFHFSVPHAAGASTDFSSASAPDQSAPPSLGHAHSEGPAPAYVASGPFREAGFPGQASSPLGRANGRLFANPRDSFSAMGFQRRFFHQDQSPVGGLTAEDIEKARQAKARPENKQHKQTLSEHARERKVPVTRIGRLANFGGLAVGLGFGALAEVAKKSLRSEDPSGKKAVLGSSPFLSEANAERIVRTLCKVRGAALKLGQMLSIQDDAFINPHLAKIFERVRQSADFMPLKQMMKTLNNDLGPNWRDKLEYFEERPFAAASIGQVHLARMKGGREVAMKIQYPGVAQSINSDVNNLMAVLNMSNMLPEGLFPEHLIDVLRRELALECDYQREAACARKFRDLLKGHPFFYVPEIVDELCSPHVLTTELVSGFPLDQAEGLSQEIRNEICYNILVLCLRELFEFHFMQTDPNWSNFFYDPQQHKVALLDFGATREYDRSFTDLYIQIIRAAADRDRETVRAKSIEMKFLTGYEVKVMEDAHLDAILILGEAFASDEPFDFGTQSTTEKIHNLIPVMLRHRLVPPPEETYSLHRKMGGSFLICSKLKARFPCKAMFEEAYSNYCKRQAQQ

SEQ ID NO: 125 - protein, 591 aa, Homo sapiens
GRGEAAAAPLNPGGGSHWLGLRLRGLRGNDEAGHRAQGATLQVRVQAMWLKVGGLLRGTGGQLGQTVGWPCGALGPGPHRWGPCGGSWAQKFYQDGPGRGLGEEDIRRAREARPRKTPRPQLSDRSRERKVPASRISRLANFGGLAVGLGLGVLAEMAKKSMPGGRLQSEGGSGLDSSPFLSEANAERIVQTLCTVRGAALKVGQMLSIQDNSFISPQLQRIFERVRQSADFMPRWQMLRVLEEELGRDWQAKVASLEEVPFAAASIGQVHQGLLRDGTEVAVKIQYPGIAQSIQSDVQNLLAVLKMSAALPAGLFAEQSLQALQQELAWECDYRREAACAQNFRQLLANDPFFRVPAVVKELCTTRVLGMELAGGVPLDQCQGLSQDLRNQICFQLLTLCLRELFEFRFMQTDPNWANFLYDASSHQVTLLDFGASREFGTEFTDHYIEVVKAAADGDRDCVLQKSRDLKFLTGFETKAFSDAHVEAVMILGEPFATQGPYDFGSGETARRIQDLIPVLLRHRLCPPPEETYALHRKLAGAFLACAHLRAHIACRDLFQDTYHRYWASRQPDAATAGSLPTKGDSWVDPS

SEQ ID NO: 126 - protein, 455 aa, Homo sapiens
MARKALKLASWTSMALAASGIYFYSNKYLDPNDFGAVRVGRAVATTAVISYDYLTSLKSVPYGSEEYLQLRSKIHDLFQSFDDTPLGTASLAQVHKAVLHDGRTVAVKVQHPKVRAQSSKDILLMEVLVLAVKQLFPEFEFMWLVDEAKKNLPLELDFLNEGRNAEKVSQMLRHFDFLKVPRIHWDLSTERVLLMEFVDGGQVNDRDYMERNKIDVNEISRHLGKMYSEMIFVNGFVHCDPHPGNVLVRKHPGTGKAEIVLLDHGLYQMLTEEFRLNYCHLWQSLIWTDMKRVKEYSQRLGAGDLYPLFACMLTARSWDSVNRGISQAPVTATEDLEIRNNAANYLPQISHLLNHVPRQMLLILKTNDLLRGIEAALGTRASASSFLNMSRCCIRALAEHKKKNTCSFFRRTQISFSEAFNLWQINLHELILRVKGLKLADRVLALICWLFPAPL

SEQ ID NO: 127 - protein, 552 aa, Homo sapiens
MGKVNVAKLRYMSRDDFRVLTAVEMGMKNHEIVPGSLIASIASLKHGGCNKVLRELVKHKLIAWERTKTVQGYRLTNAGYDYLALKTLSSRQVVESVGNQMGVGKESDIYIVANEEGQQFALKLHRLGRTSFRNLKNKRDYHKHRHNVSWLYLSRLSAMKEFAYMKALYERKFPVPKPIDYNRHAVVMELINGYPLCQIHHVEDPASVYDEAMELIVKLANHGLIHGDFNEFNLILDESDHITMIDFPQMVSTSHPNAEWYFDRDVKCIKDFFMKRFSYESELFPTFKDIRREDTLDVEVSASGYTKEMQADDELLHPLGPDDKNIETKEGSEFSFSDGEVAEKAEVYRSENESERNCLEESEGCYCRSSGDPEQIKEDSLSEESADARSFEMTEFNQALEEIKGQVVENNSVTEFSEEKNRTENYNRQDGQRVQGGVPAGSDEYEDECPHLIALSSLNREFRPFRDEENVGAMNQYRTRTLSITSSGSAVSCSTIPPELVKQKVKRQLTKQQKSAVRRRLQKGEANIFTKQRRENMQNIKSSLEAASFWGE

SEQ ID NO: 128 - protein, 801 aa, Homo sapiens
MLQNVTPHNKLPGEGNAGLLGLGPEAAAPGKRIRKPSLLYEGFESPTMASVPALQLTPANPPPPEVSNPKKPGRVTNQLQYLHKVVMKALWKHQFAWPFRQPVDAVKLGLPDYHKIIKQPMDMGTIKRRLENNYYWAASECMQDFNTMFTNCYIYNKPTDDIVLMAQTLEKIFLQKVASMPQEEQELVVTIPKNSHKKGAKLAALQGSVTSAHQVPAVSSVSHTALYTPPPEIPTTVLNIPHPSVISSPLLKSLHSAGPPLLAVTAAPPAQPLAKKKGVKRKADTTTPTPTAILAPGSPASPPGSLEPKAARLPPMRRESGRPIKPPRKDLPDSQQQHQSSKKGKLSEQLKHCNGILKELLSKKHAAYAWPFYKPVDASALGLHDYHDIIKHPMDLSTVKRKMENRDYRDAQEFAADVRLMFSNCYKYNPPDHDVVAMARKLQDVFEFRYAKMPDEPLEPGPLPVSTAMPPGLAKSSSESSSEESSSESSSEEEEEEDEEDEEEEESESSDSEEERAHRLAELQEQLRAVHEQLAALSQGPISKPKRKREKKEKKKKRKAEKHRGRAGADEDDKGPRAPRPPQPKKSKKASGSGGGSAALGPSGFGPSGGSGTKLPKKATKTAPPALPTGYDSEEEEESRPMSYDEKRQLSLDINKLPGEKLGRVVHIIQAREPSLRDSNPEEIEIDFETLKPSTLRELERYVLSCLRKKPRKPYTIKKPVGKTKEELALEKKRELEKRLQDVSGQLNSTKKPPKKANEKTESSSAQQVAVSRLSASSSSSDSSSSSSSSSSSDTSDSDSG

SEQ ID NO: 129 - protein, 726 aa, Homo sapiens
MSTATTVAPAGIPATPGPVNPPPPEVSNPSKPGRKTNQLQYMQNVVVKTLWKHQFAWPFYQPVDAIKLNLPDYHKIIKNPMDMGTIKKRLENNYYWSASECMQDFNTMFTNCYIYNKPTDDIVLMAQALEKIFLQKVAQMPQEEVELLPPAPKGKGRKPAAGAQSAGTQQVAAVSSVSPATPFQSVPPTVSQTPVIAATPVPTITANVTSVPVPPAAAPPPPATPIVPVVPPTPPVVKKKGVKRKADTTTPTTSAITASRSESPPPLSDPKQAKVVARRESGGRPIKPPKKDLEDGEVPQHAGKKGKLSEHLRYCDSILREMLSKKHAAYAWPFYKPVDAEALELHDYHDIIKHPMDLSTVKRKMDGREYPDAQGFAADVRLMFSNCYKYNPPDHEVVAMARKLQDVFEMRFAKMPDEPVEAPALPAPAAPMVSKGAESSRSSEESSSDSGSSDSEEERATRLAELQEQLKAVHEQLAALSQAPVNKPKKKKEKKEKEKKKKDKEKEKEKHKVKAEEEKKAKVAPPAKQAQQKKAPAKKANSTTTAGRQLKKGGKQASASYDSEEEEEGLPMSYDEKRQLSLDINRLPGEKLGRVVHIIQSREPSLRDSNPDEIEIDFETLKPTTLRELERYVKSCLQKKQRKPFSASGKKQAAKSKEELAQEKKKELEKRLQDVSGQLSSSKKPARKEKPGSAPSGGPSRLSSSSSSESGSSSSSGSSSDSSDSE

SEQ ID NO: 130 - protein, 722 aa, Homo sapiens
MSAESGPGTRLRNLPVMGDGLETSQMSTTQAQAQPQPANAASTNPPPPETSNPNKPKRQTNQLQYLLRVVLKTLWKHQFAWPFQQPVDAVKLNLPDYYKIIKTPMDMGTIKKRLENNYYWNAQECIQDFNTMFTNCYIYNKPGDDIVLMAEALEKLFLQKINELPTEETEIMIVQAKGRGRGRKETGTAKPGVSTVPNTTQASTPPQTQTPQPNPPPVQATPHPFPAVTPDLIVQTPVMTVVPPQPLQTPPPVPPQPQPPPAPAPQPVQSHPPIIAATPQPVKTKKGVKRKADTTTPTTIDPIHEPPSLPPEPKTTKLGQRRESSRPVKPPKKDVPDSQQHPAPEKSSKVSEQLKCCSGILKEMFAKKHAAYAWPFYKPVDVEALGLHDYCDIIKHPMDMSTIKSKLEAREYRDAQEFGADVRLMFSNCYKYNPPDHEVVAMARKLQDVFEMRFAKMPDEPEEPVVAVSSPAVPPPTKVVAPPSSSDSSSDSSSDSDSSTDDSEEERAQRLAELQEQLKAVHEQLAALSQPQQNKPKKKEKDKKEKKKEKHKRKEEVEENKKSKAKEPPPKKTKKNNSSNSNVSKKEPAPMKSKPPPTYESEEEDKCKPMSYEEKRQLSLDINKLPGEKLGRVVHIIQSREPSLKNSNPDEIEIDFETLKPSTLRELERYVTSCLRKKRKPQAEKVDVIAGSSKMKGFSSSESESSSESSSSDSEDSETGPA

SEQ ID NO: 131 - protein, 947 aa, Homo sapiens
MSLPSRQTAIIVNPPPPEYINTKKNGRLTNQLQYLQKVVLKDLWKHSFSWPFQRPVDAVKLKLPDYYTIIKNPMDLNTIKKRLENKYYAKASECIEDFNTMFSNCYLYNKPGDDIVLMAQALEKLFMQKLSQMPQEEQVVGVKERIKKGTQQNIAVSSAKEKSSPSATEKVFKQQEIPSVFPKTSISPLNVVQGASVNSSSQTAAQVTKGVKRKADTTTPATSAVKASSEFSPTFTEKSVALPPIKENMPKNVLPDSQQQYNVVETVKVTEQLRHCSEILKEMLAKKHFSYAWPFYNPVDVNALGLHNYYDVVKNPMDLGTIKEKMDNQEYKDAYSFAADVRLMFMNCYKYNPPDHEVVTMARMLQDVFETHFSKIPIEPVESMPLCYIKTDITETTGRENTNEASSEGNSSDDSEDERVKRLAKLQEQLKAVHQQLQVLSQVPFRKLNKKKEKSKKEKKKEKVNNSNENPRKMCEQMRLKEKSKRNQPKKRKQQFIGLKSEDEDNAKPMNYDEKRQLSLNINKLPGDKLGRVVHIIQSREPSLSNSNPDEIEIDFETLKASTLRELEKYVSACLRKRPLKPPAKKIMMSKEELHSQKKQELEKRLLDVNNQLNSRKRQTKSDKTQPSKAVENVSRLSESSSSSSSSSESESSSSDLSSSDSSDSESEMFPKFTEVKPNDSPSKEHVKKMKNECILPEGRTGVTQIGYCVQDTTSANTTLVHQTTPSHVMPPNHHQLAFNYQELEHLQTVKNISPLQILPPSGDSEQLSNGITVMHPSGDSDTTMLESECQAPVQKDIKIKNADSWKSLGKPVKPSGVMKSSDELFNQFRKAAIEKEVKARTQELIRKHLEQNTKELKASQENQRDLGNGLTVESFSNKIQNKCSGEEQKEHPQSSEAQDKSKLWLLKDRDLARPKEQERRRREAMVGTIDMTLQSDIMTMFENNFD

SEQ ID NO: 132 - protein, 1392 aa, Homo sapiens
MANDSPAKSLVDIDLSSLRDPAGIFELVEVVGNGTYGQVYKGRHVKTGQLAAIKVMDVTEDEEEEIKLEINMLKKYSHHRNIATYYGAFIKKSPPGHDDQLWLVMEFCGAGSITDLVKNTKGNTLKEDWIAYISREILRGLAHLHIHHVIHRDIKGQNVLLTENAEVKLVDFGVSAQLDRTVGRRNTFIGTPYWMAPEVIACDENPDATYDYRSDLWSCGITAIEMAEGAPPLCDMHPMRALFLIPRNPPPRLKSKKWSKKFFSFIEGCLVKNYMQRPSTEQLLKHPFIRDQPNERQVRIQLKDHIDRTRKKRGEKDETEYEYSGSEEEEEEVPEQEGEPSSIVNVPGESTLRRDFLRLQQENKERSEALRRQQLLQEQQLREQEEYKRQLLAERQKRIEQQKEQRRRLEEQQRREREARRQQEREQRRREQEEKRRLEELERRRKEEEERRRAEEEKRRVEREQEYIRRQLEEEQRHLEVLQQQLLQEQAMLLECRWREMEEHRQAERLQRQLQQEQAYLLSLQHDHRRPHPQHSQQPPPPQQERSKPSFHAPEPKAHYEPADRAREVEDRFRKTNHSSPEAQSKQTGRVLEPPVPSRSESFSNGNSESVHPALQRPAEPQVQWSHLASLKNNVSPVSRSHSFSDPSPKFAHHHLRSQDPCPPSRSEVLSQSSDSKSEAPDPTQKAWSRSDSDEVPPRVPVRTTSRSPVLSRRDSPLQGSGQQNSQAGQRNSTSSIEPRLLWERVEKLVPRPGSGSSSGSSNSGSQPGSHPGSQSGSGERFRVRSSSKSEGSPSQRLENAVKKPEDKKEVFRPLKPAGEVDLTALAKELRAVEDVRPPHKVTDYSSSSEESGTTDEEDDDVEQEGADESTSGPEDTRAASSLNLSNGETESVKTMIVHDDVESEPAMTPSKEGTLIVRQSTVDQKRASHHESNGFAGRIHLLPDLLQQSHSSSTSSTSSSPSSSQPTPTMSPQTPQDKLTANETQSASSTLQKHKSSSSFTPFIDPRLLQISPSSGTTVTSVVGFSCDGMRPEAIRQDPTRKGSVVNVNPTNTRPQSDTPEIRKYKKRFNSEILCAALWGVNLLVGTESGLMLLDRSGQGKVYPLINRRRFQQMDVLEGLNVLVTISGKKDKLRVYYLSWLRNKILHNDPEVEKKQGWTTVGDLEGCVHYKVVKYERIKFLVIALKSSVEVYAWAPKPYHKFMAFKSFGELVHKPLLVDLTVEEGQRLKVIYGSCAGFHAVDVDSGSVYDIYLPTHVRKNPHSMIQCSIKPHAIIILPNTDGMELLVCYEDEGVYVNTYGRITKDVVLQWGEMPTSVAYIRSNQTMGWGEKAIEIRSVETGHLDGVFMHKRAQRLKFLCERNDKVFFASVRSGGSSQVYFMTLGRTSLLSW

SEQ ID NO: 133 - DNA, 239 bp, Homo sapiens
gtgaggcgctcaggtggacactgttcccctgactcacccccaccctagcagctgagggaagccggggataaaagaggctgctgaagcatccagcctcgtggtggcctaattggctgtgtgtcaccagcctggcggggctgacctggggtgccctgggagccagggcagggccaggccatggactcaagggtttggattttggggcctgtgtcactccctttccctgcccaaccctccag

SEQ ID NO: 134 - DNA, 79 bp, Homo sapiens
tctgtgcggttgactccttttcctccccgcctggagatccccgtggtgtcgactggaagcatggaggcaccttggggag

SEQ ID NO: 135 - DNA, 389 bp, Homo sapiens
atcctgagagtgagaagcctgactgaccccgcctagacgccaggcccacttcacgccgtctaagtggagaagtgacggaccctcagggccagctgctcctcctgtccagttcacgctgttttgtaaccactttctaagcattttttattcacaattggaaacacaaatgtaatgcaagaataaaaaatattttggggcagaaaggactttggtttttcaaactatttcctctctggtggccctcggccagccaggtgactgggatgtgacaggggtggggggacattcccaggaccctggcatgctcaggatagccctgttctctgcagggccctggaggtggcggccccggggaggctgatctccaagtccccccgatgccagctggc

SEQ ID NO: 136 - DNA, 216 bp, Homo sapiens
gttcaagtccaatgggaaagaaatatcttccttcaacagctgaatatgttactggaagtttggagaatcattactagatggcaaaaacaaaagatgttccttccattttgtgaactgcataagagatcttggggggtgggcgatgaagagaggtatactgtggtctcactagtcaaggacagctaatagctgtaaaacaggtggctttggataact

SEQ ID NO: 137 - protein, 7 aa, Artificial Sequence
  Description of Artificial Sequence: Synthetic illustrative consensus signature sequence
  MOD_RES (4)..(6): Variable amino acid
HGDXXXN

SEQ ID NO: 138 - protein, 6 aa, Artificial Sequence
  Description of Artificial Sequence: 6-His tag
HHHHHH

SEQ ID NO: 139 - DNA, 28 bp, Homo sapiens
attcttaatagatttgaatagcgacgta

SEQ ID NO: 140 - DNA, 16 bp, Artificial Sequence
  Description of Artificial Sequence: Illustrative nucleotide sequence
  modified_base (15)..(16): a, c, g or t
gatcrywskmbvdhnn

SEQ ID NO: 141 - DNA, 16 bp, Artificial Sequence
  Description of Artificial Sequence: Illustrative nucleotide sequence
  modified_base (1)..(2): a, c, g or t
nndhbvkmwsrygatc

SEQ ID NO: 142 - DNA, 20 bp, Artificial Sequence
  Description of Artificial Sequence: Synthetic primer
ggagctgtcgtattccagtc

SEQ ID NO: 143 - DNA, 21 bp, Artificial Sequence
  Description of Artificial Sequence: Synthetic primer
aacccctcaagacccgtttag

1. An isolated antibody or antibody fragment having specific binding affinity to a kinase polypeptide or to a domain of said polypeptide, wherein said polypeptide has an amino acid sequence selected from the group consisting of those set forth in SEQ ID NO:67 through 132.

2. The antibody or antibody fragment of claim 1, wherein said antibody or antibody fragment is monoclonal.

3. The antibody or antibody fragment of claim 1, wherein said antibody or antibody fragment is polyclonal.

4. The antibody or antibody fragment of claim 1, wherein said antibody or antibody fragment is humanized.

5. A kit comprising the antibody or antibody fragment of claim 1 and a negative control antibody.

6. A hybridoma that produces the antibody of claim 1.

7-36. (canceled)
